(19) United States
(12) Patent Application Publication
(10) Pub. No.: US 2016/0222370 A1
(43) Pub. Date: Aug. 4, 2016

(54) Recombinant Yeast Host Cell With Fe-S Cluster Proteins And Methods Of Using Thereof

(71) Applicant: Butamax Advanced Biofuels LLC, Wilmington, DE (US)

(72) Inventors: Larry Cameron ANTHONY, Aston, PA (US); Dennis Flint, Newark, DE (US); Wonchul Suh, Hockessin, DE (US); Rick W. Ye, Hockessin, DE (US); Steven Cary Rothman, Wilmington, DE (US); Jean-Francois Tomb, Wilmington, DE (US)

(21) Appl. No.: 15/016,759

(22) Filed: Feb. 5, 2016

Related U.S. Application Data
(63) Continuation-in-part of application No. 14/873,956, filed on Oct. 2, 2015.
Application No. 14/873,956 is a division of application No. 12/569,069, filed on Sep. 29, 2009, now Pat. No. 9,206,447.
Application No. 12/569,069 is a continuation-in-part of application No. 12/569,636, filed on Sep. 29, 2009.
(60) Provisional application No. 61/100,801, filed on Sep. 29, 2008.
(60) Provisional application No. 61/100,806, filed on Sep. 29, 2008.
(60) Provisional application No. 61/100,792, filed on Sep. 29, 2008.

(51) Int. Cl. C12N 9/88; C12P 7/16

(52) U.S. Cl. CPC C12N 9/88; C12P 7/16; C12Y 402/01009

(57) ABSTRACT

Yeast strains were engineered that have increased activity of heterologous proteins that require binding of an Fe—S cluster for their activity. The yeast strains have reduced activity of an endogenous Fe—S protein. Activities of heterologous bacterial, fungal or plant 2Fe-2S dihydroxy-acid dehydratases and Fe—S propanediol dehydratase reactivase were increased for increased production of products made using biosynthetic pathways including these enzymes, such as valine, isoleucine, leucine, pantothenic acid (vitamin B5), isobutanol, 2-butanone and 2-butanol.

### CROSS REFERENCE TO RELATED APPLICATIONS

[0001] This application is a continuation-in-part application of U.S. patent application Ser. No. 14/873,956, filed on Oct. 2, 2015, which is a division of U.S. patent application Ser. No. 12/569,069, filed on Sept. 29, 2009, which is related to and claims the benefit of priority to U.S. Provisional Application Nos. 61/100,801, filed on Sept. 29, 2008 and U.S. Provisional Application No. 61/100,806, filed on Sep. 29, 2008, and a continuation-in-part of U.S. application Ser. No. 12/569,636, filed Sep. 29, 2009, which claims the benefit of priority to U.S. Provisional Application No. 61/100,792, filed Sep. 29, 2008. The entirety of each is hereby incorporated by reference.

### FIELD OF THE INVENTION

[0002] The invention relates to the field of industrial microbiology and the expression of proteins that require an iron-sulfur cluster for activity. More specifically, expression of heterologous Fe—S protein activity in yeast cells is improved through specific host gene inactivation.

### BACKGROUND OF THE INVENTION

[0003] Engineering of yeast for fermentative production of commercial products is an active and growing field. Enzymatic pathways engineered for biosynthesis of some products include enzymes that require binding of an iron-sulfur (Fe—S) cluster for activity. Dihydroxy-acid dehydratase (DHAD) is one example. DHAD is part of naturally occurring biosynthetic pathways producing valine, isoleucine, leucine and pantothenic acid (vitamin B5). Increased expression of DHAD activity is desired for enhanced microbial production of branched chain amino acids or of pantothenic acid. In addition, DHAD catalyzed conversion of 2,3-dihydroxyisovalerate to α-ketoisovalerate is a common step in the multiple isobutanol biosynthetic pathways that are disclosed in co-pending US Patent Pub No. US 20070092957 A1. Disclosed therein is engineering of recombinant microorganisms for production of isobutanol, which is useful as a fuel additive and whose availability may reduce the demand for petrochemical fuels.

[0004] Diol dehydratase provides an enzyme activity in a biosynthetic pathway for production of 2-butanone and 2-butanol that is disclosed in co-pending US Patent Pub No. US 2007-0292927A1. Disclosed in US Patent Pub No. US20090155870 is a butanediol dehydratase that is useful for expression in this pathway due to its coenzyme B-12 independence. A diol dehydratase reactivase that is an Fe—S cluster protein required for activity of the B12-independent butanediol dehydratase, is also disclosed in US Patent Pub No. US20090155870. 2-Butanone, also referred to as methyl ethyl ketone (MEK), is a widely used solvent, extractant and activator of oxidative reactions, as well as a substrate for chemical synthesis of 2-butanol. 2-butanol is useful as a fuel additive, whose availability may reduce the demand for petrochemical fuels.

[0005] For improved production of compounds synthesized in pathways including an Fe—S cluster containing enzyme, it is desirable to provide a host cell capable of expressing high levels of this enzymatic activity in the production host of interest. Whereas a number of commercially relevant bacteria and yeast can express activity of Fe—S cluster containing proteins, this activity is at levels far below what is commercially useful for enhancing introduced biosynthetic pathways. Consequently a need exists for the discovery of host cells capable of expressing activity of Fe—S cluster containing proteins at levels high enough to enhance introduced pathways that have Fe—S requirements. Obtaining high functional expression of heterologous Fe—S cluster containing enzymes is problematic due to the Fe—S cluster requirement, which involves availability and proper loading of the cluster into the apo-protein.

### SUMMARY OF THE INVENTION

[0006] Provided herein are recombinant yeast host cells comprising at least one heterologous Fe—S cluster protein wherein the yeast host has reduced expression of at least one endogenous Fe—S cluster protein.

[0007] The recombinant yeast cell may be grown under suitable conditions for the production of products including isobutanol, 2-butanol and 2-butanone.

[0008] In one aspect, the recombinant yeast cell comprises a disruption in the gene encoding the at least one endogenous Fe—S cluster protein.

[0009] In another aspect, the endogenous Fe—S cluster protein is selected from the group consisting of dihydroxy-acid dehydratase, isopropylmalate dehydratase, sulfite reductase, glutamate dehyddrogenase, biotin synthase, aconitase, homoaconitase, lipoate synthase, ferredoxin maturation, NADH ubiquinone oxidoreductase, succinate dehydrogenase, ubiquinol-cytochrome-c reductase, ABC protein Rli1, NTPase Nbp35, and hydrogenase-like protein.

[0010] In another aspect, the yeast is selected from the group consisting of Saccharomyces, Schizosaccharomyces, Hansenula, Candida, Kluyveromyces, Yarrowia and Pichia.

[0011] In another aspect, the endogenous Fe—S protein is expressed in the mitochondria, and in another embodiment, the endogenous Fe—S cluster protein has an activity selected from the group consisting of: dihydroxy-acid dehydratase and isopropylmalate dehydratase activity.

[0012] In another aspect, the host cell is Saccharomyces expressing a gene encoding a polypeptide having the amino acid sequence as set forth in SEQ ID NO:114.

[0013] In some embodiments, the at least one heterologous Fe—S cluster protein is selected from the group consisting of bacterial 2Fe-2S dihydroxy-acid dehydratases, fungal 2Fe-2S dihydroxy-acid dehydratases and plant 2Fe-2S dihydroxy-acid dehydratases. In one embodiment, the heterologous bacterial, fungal or plant 2Fe-2S cluster dihydroxy-acid dehydratase is expressed in the cytosol. In one embodiment, the heterologous bacterial, fungal or plant 2Fe-2S cluster dihydroxy-acid dehydratase is a polypeptide having an amino acid sequence that matches the Profile HMM of table 9 with an E value of <10⁻⁵ wherein the polypeptide additionally comprises all three conserved cysteines, corresponding to positions 56, 129, and 201 in the amino acids sequences of the Streptococcus mutans DHAD enzyme corresponding to SEQ ID NO:179. In one embodiment, the heterologous fungal or plant 2Fe-2S cluster dihydroxy-acid dehydratase is a polypeptide having an amino acid sequence that has at least about 95% sequence identity to an amino acid sequence selected from the group consisting of SEQ ID NOs:46, 48, 50, 52, 54, 56, 58, 60, 62, 64, 66, 68, 70, 72, 74, 76, 78, 80, 82, 84, 86, 88, 90, 92, 94, 96, 98, 100, 102, 104, 106, 108, 110, 112, 114, 116, 118, 120, 122, 124, 126, 128, 130, 132, 134, 136, 138, 140, 142, 144, 146, 148, 150 and 152. In one embodiment, the heterologous fungal or plant 2Fe-2S cluster dihydroxy-acid dehydratase is a polypeptide having an amino acid sequence that is at least about 90% identical to SEQ ID NO:114 using the Clustal W method of alignment using the default parameters of GAP PENALTY=10, GAP LENGTH PENALTY=0.1, and Gonnet 250 series of protein weight matrix over the full length of the protein sequence. In one embodiment, the heterologous bacterial 2Fe-2S cluster dihydroxy-acid dehydratase is a polypeptide having an amino acid sequence that has at least about 95% sequence identity to an amino acid sequence selected from the group consisting of SEQ ID NOs:175, 177, 179, 181, 183, 185, 187, and 189. In one embodiment, the heterologous bacterial 2Fe-2S cluster dihydroxy-acid dehydratase is a polypeptide having an amino acid sequence that is at least about 90% identical to SEQ ID NO: 179 or 187 using the Clustal W method of alignment using the default parameters of GAP PENALTY=10, GAP LENGTH PENALTY=0.1, and Gonnet 250 series of protein weight matrix over the full length of the protein sequence.

[0014] In another aspect, a method for the conversion of 2,3-dihydroxyisovalerate to α-ketoisovalerate is provided, said method comprising:

[0015] a) providing (1) a recombinant yeast host cell comprising at least one heterologous gene encoding a 2Fe-2S dihydroxy-acid dehydratase wherein the recombinant yeast host cell has reduced activity of at least one endogenous Fe—S cluster protein; and (2) a source of 2,3-dihydroxyisovalerate; and

[0016] b) growing the recombinant host cell of (a) with said source of 2,3-dihydroxyisovalerate under conditions where the 2,3-dihydroxyisovalerate is converted by the host cell to α-ketoisovalerate.

[0017] In another aspect, a method for the conversion of 2,3-butanediol to 2-butanone is provided, said method comprising:

[0018] a) providing (1) a recombinant yeast host cell comprising at least one heterologus gene encoding a Fe—S propanediol dehydratase reactivase wherein the recombinant yeast host cell has reduced activity of at least one endogenous Fe—S cluster protein; and (2) a source of 2,3-butanediol; and

[0019] b) growing the recombinant host cell of (a) with said source of 2,3-butanediol under conditions where 2,3-butanediol is converted by the hots cell to 2-butanone.

[0020] Also provided is a method for the production of isobutanol comprising growing a recombinant yeast host cell disclosed herein under conditions wherein isobutanol is produced.

[0021] In other embodiments, the at least one heterologous Fe—S cluster protein has Fe—S propanediol dehydratase reactivase activity. In some embodiments, the at least one heterologous Fe—S cluster protein having Fe—S propanediol dehydratase reactivase activity is a propanediol deydratase reactivase having an amino acid sequence that is at least about 90% identical to the amino acid sequence as set forth in SEQ ID NO:44 using the Clustal W method of alignment using the default parameters of GAP PENALTY=10, GAP LENGTH PENALTY=0.1, and Gonnet 250 series of protein weight matrix over the full length of the protein sequence.

[0022] In some embodiments, the cell produces 2-butanol, and in some embodiments the cell produces 2-butanone. In some embodiments, the cell comprises a 2-butanol biosynthetic pathway, and in some embodiments, the cell comprises a 2-butanone biosynthetic pathway.

### BRIEF DESCRIPTION OF THE FIGURES AND SEQUENCE DESCRIPTIONS

[0023] The invention can be more fully understood from the following detailed description, figures, and the accompanying sequence descriptions, which form a part of this application.

[0024] FIG. 1 shows biosynthetic pathways for isobutanol production.

[0025] FIG. 2 shows a biosynthetic pathway for 2-butanone and 2-butanol production.

[0026] Table 9 is a table of the Profile HMM for dihydroxy-acid dehydratases based on enzymes with assayed function prepared as described in Example 1.

[0027] The following sequences conform with 37 C.F.R. 1.821-1.825 (“Requirements for Patent Applications Containing Nucleotide Sequences and/or Amino Acid Sequence Disclosures-the Sequence Rules”) and are consistent with World Intellectual Property Organization (WIPO) Standard ST.25 (1998) and the sequence listing requirements of the EPO and PCT (Rules 5.2 and 49.5(a-bis), and Section 208 and Annex C of the Administrative Instructions). The symbols and format used for nucleotide and amino acid sequence data comply with the rules set forth in 37 C.F.R. §1.822.

TABLE 1
Inactivation target Fe—S protein encoding genes

| | SEQ ID NO: | SEQ ID NO: |
|---|---|---|
| Organism and gene | Nucleic Acid | Peptide |
| Saccharomyces cerevisiae LEU1 | 1 | 2 |
| Schizosaccharomyces pombe LEU1 | 3 | 4 |
| Candida galbrata CBS 138 LEU1 | 5 | 6 |
| Candida albicans SC 5314 LEU1 | 7 | 8 |
| Kluyveromyces lactis LEU1 | 9 | 10 |
| Yarrowia lipolytica LEU1 | 11 | 12 |
| Pichia stipitis LEU1 | 13 | 14 |
| Saccharomyces cerevisiae YJM789 | 111 | 112 |
| ILV3 | | |
| Schizosaccharomyces pombe ILV3 | 93 | 94 |
| Candida galbrata CBS 138 ILV3 | 107 | 108 |
| Candida albicans SC5314 ILV3 | 101 | 102 |
| Kluyveromyces lactis ILV3 | 113 | 114 |
| Yarrowia lipolytica ILV3 | 105 | 106 |
| Pichia stipitis CBS 6054 ILV3 | 103 | 104 |
| Saccharomyces cerevisiae ACO1 | 153 | 154 |
| Schizosaccharomyces pombe | 155 | 156 |
| (chromosome II) ACO1 | | |
| Schizosaccharomyces pombe | 157 | 158 |
| (chromosome I) ACO1 | | |
| Kluyveromyces lactis NRRL Y-1140 | 159 | 160 |
| ACO1 | | |
| Candida albicans SC5314 ACO1 | 161 | 162 |
| Yarrowia lipolytica CLIB122 ACO1 | 163 | 164 |
| Pichia stipitis CBS 6054 ACO1 | 165 | 166 |
| Candida glabrata CBS138 | 167 | 168 |
| (chromosome F) ACO1 | | |
| Candida glabrata CBS138 | 169 | 170 |
| (chromosome D) ACO1 | | |
| Candida glabrata CBS138 | 171 | 172 |
| (chromosome K) ACO1 | | |

TABLE 2
Fungal and plant 2Fe—2S DHADs in addition to those in Table 1

| | SEQ ID NO: | SEQ ID NO: |
|---|---|---|
| Description | Nucleic acid | Peptide |
| Chlamydomonas reinhardtii | 45 | 46 |
| Ostreococcus lucimarinus CCE9901 | 47 | 48 |
| Vitis vinifera | 49 | 50 |
| (Unnamed protein product: | | |
| CAO71581.1) | | |
| Vitis vinifera | 51 | 52 |
| (CAN67446.1) | | |
| Arabidopsis thaliana | 53 | 54 |
| Oryza sativa (indica cultivar-group) | 55 | 56 |
| Physcomitrella patens subsp. patens | 57 | 58 |
| Chaetomium globosum CBS 148.51 | 59 | 60 |
| Neurospora crassa OR74A | 61 | 62 |
| Magnaporthe grisea 70-15 | 63 | 64 |
| Gibberella zeae PH-1 | 65 | 66 |
| Aspergillus niger | 67 | 68 |
| Neosartorya fischeri NRRL 181 | 69 | 70 |
| (XP_001266525.1) | | |
| Neosartorya fischeri NRRL 181 | 71 | 72 |
| (XP_001262996.1) | | |
| Aspergillus niger | 73 | 74 |
| (An03g04520) | | |
| Aspergillus niger | 75 | 76 |
| (An14g03280) | | |
| Aspergillus terreus NIH2624 | 77 | 78 |
| Aspergillus clavatus NRRL 1 | 79 | 80 |
| Aspergillus nidulans FGSC A4 | 81 | 82 |
| Aspergillus oryzae | 83 | 84 |
| Ajellomyces capsulatus NAm1 | 85 | 86 |
| Coccidioides immitis RS | 87 | 88 |
| Botryotinia fuckeliana B05.10 | 89 | 90 |
| Phaeosphaeria nodorum SN15 | 91 | 92 |
| Pichia guilliermondii ATCC 6260 | 95 | 96 |
| Debaryomyces hansenii CBS767 | 97 | 98 |
| Lodderomyces elongisporus NRRL | 99 | 100 |
| YB-4239 | | |
| Vanderwaltozyma polyspora DSM | 109 | 110 |
| 70294 | | |
| Ashbya gossypii ATCC 10895 | 115 | 116 |
| Laccaria bicolor S238N-H82 | 117 | 118 |
| Coprinopsis cinerea okayama7#130 | 119 | 120 |
| Cryptococcus neoformans var. | 121 | 122 |
| neoformans JEC21 | | |
| Ustilago maydis 521 | 123 | 124 |
| Malassezia globosa CBS 7966 | 125 | 126 |
| Aspergillus clavatus NRRL 1 | 127 | 128 |
| Neosartorya fischeri NRRL 181 | 129 | 130 |
| (Putative) | | |
| Aspergillus oryzae | 131 | 132 |
| Aspergillus niger (An18g04160) | 133 | 134 |
| Aspergillus terreus NIH2624 | 135 | 136 |
| Coccidioides immitis RS | 137 | 138 |
| (CIMG_04591) | | |
| Paracoccidioides brasiliensis | 139 | 140 |
| Phaeosphaeria nodorum SN15 | 141 | 142 |
| Gibberella zeae PH-1 | 143 | 144 |
| Neurospora crassa OR74A | 145 | 146 |
| Coprinopsis cinerea okayama 7#130 | 147 | 148 |
| Laccaria bicolor S238N-H82 | 149 | 150 |
| Ustilago maydis 521 | 151 | 152 |

TABLE 3
Expression genes

| | SEQ ID NO: | SEQ ID NO: |
|---|---|---|
| Description | Nucleic acid | Peptide |
| Roseburia inulinivorans (RdhtA) | 15 | 43 |
| Roseburia inulinivorans (RdhtB) | 16 | 44 |
| Bacillus subtilis (alsS) | 27 | 28 |
| Vibrio cholerae (KARI) | 35 | 36 |
| Pseudomonas aeruginosa PAO1 | 37 | 38 |
| (KARI) | | |
| Pseudomonas fluorescens PF5 | 39 | 40 |
| (KARI) | | |
| Achromobacter xylosoxidans (sadB) | 41 | 42 |
| B12-independent glycerol dehydratase | 190 | 191 |
| from Clostridium butyricum | | |
| B-12 independent butanediol | 192 | 193 |
| dehydratase reactivase from | | |
| Clostridium butyricum | | |

[0028] SEQ ID NO:17 is a synthetic rdhtAB sequence.

[0029] SEQ ID NOs:18-21 and 30-33 are primers for PCR, cloning or sequencing analysis used a described in the Examples herein.

[0030] SEQ ID NO:22 is a dual terminator sequence.

[0031] SEQ ID NO:23 is the Saccharomyces cerevisiae ADH terminator.

[0032] SEQ ID NO:24 is the Saccharomyces cerevisiae CYC1 terminator.

[0033] SEQ ID NO:25 is the Saccharomyces cerevisiae FBA promoter.

[0034] SEQ ID NO:26 is the Saccharomyces cerevisiae GPM promoter.

[0035] SEQ ID NO:29 is the pNY13 vector.

[0036] SEQ ID NO:34 is the Saccharomyces cerevisiae CUP1 promoter.

[0037] SEQ ID NO:173 is the codon optimized coding region for ILV3 DHAD from Kluyveromyces lactis.

TABLE 4
Functionally verified DHADs used for Profile HMM

| | SEQ ID NO: | SEQ ID NO: |
|---|---|---|
| Organism | Nucleic acid | Peptide |
| Nitrosomonas europaea ATCC 19718 | 174 | 175 |
| Synechocystis sp. PCC 6803 | 176 | 177 |
| Streptococcus mutans UA159 | 178 | 179 |
| Streptococcus thermophilus LMG | 180 | 181 |
| 18311 | | |
| Ralstonia metallidurans CH34 | 182 | 183 |
| Ralstonia eutropha JMP134 | 184 | 185 |
| Lactococcus lactis subsp. cremoris | 186 | 187 |
| SK11 | | |
| Flavobacterium johnsoniae UW101 | 188 | 189 |

### DETAILED DESCRIPTION OF THE INVENTION

[0038] Disclosed herein is the discovery that introduced Fe—S containing proteins in yeast host cells have high activity levels when expression of endogenous Fe—S containing proteins is inhibited or disrupted. The present invention relates to recombinant yeast cells engineered to provide expression of at least one heterologous protein that is an Fe—S cluster protein, and engineered for reduced expression of at least one endogenous Fe—S cluster protein. In these cells the activity of the heterologous Fe—S cluster protein is improved, such that there is improved production of a product made in a biosynthetic pathway that includes the enzyme activity. Examples of commercially useful products from a pathway including an Fe—S protein include valine, isoleucine, leucine, pantothenic acid, iosbutanol, 2-butanone and 2-butanol.

[0039] The following abbreviations and definitions will be used for the interpretation of the specification and the claims.

[0040] As used herein, the terms “comprises,” “comprising,” “includes,” “including,” “has,” “having,” “contains” or “containing,” or any other variation thereof, are intended to cover a non-exclusive inclusion. For example, a composition, a mixture, process, method, article, or apparatus that comprises a list of elements is not necessarily limited to only those elements but may include other elements not expressly listed or inherent to such composition, mixture, process, method, article, or apparatus. Further, unless expressly stated to the contrary, “or” refers to an inclusive or and not to an exclusive or. For example, a condition A or B is satisfied by any one of the following: A is true (or present) and B is false (or not present), A is false (or not present) and B is true (or present), and both A and B are true (or present).

[0041] Also, the indefinite articles “a” and “an” preceding an element or component of the invention are intended to be nonrestrictive regarding the number of instances (i.e. occurrences) of the element or component. Therefore “a” or “an” should be read to include one or at least one, and the singular word form of the element or component also includes the plural unless the number is obviously meant to be singular.

[0042] The term “invention” or “present invention” as used herein is a non-limiting term and is not intended to refer to any single embodiment of the particular invention but encompasses all possible embodiments as described in the specification and the claims.

[0043] As used herein, the term “about” modifying the quantity of an ingredient or reactant of the invention employed refers to variation in the numerical quantity that can occur, for example, through typical measuring and liquid handling procedures used for making concentrates or use solutions in the real world; through inadvertent error in these procedures; through differences in the manufacture, source, or purity of the ingredients employed to make the compositions or carry out the methods; and the like. The term “about” also encompasses amounts that differ due to different equilibrium conditions for a composition resulting from a particular initial mixture. Whether or not modified by the term “about”, the claims include equivalents to the quantities. In one embodiment, the term “about” means within 10% of the reported numerical value, preferably within 5% of the reported numerical value.

[0044] The term “Fe—S cluster protein” is a protein that binds an iron-sulfur cluster and requires the binding of the cluster for its activity.

[0045] The term “2Fe-2S DHAD” refers to DHAD enzymes requiring a bound [2Fe-2S]²⁺cluster for activity.

[0046] The term “Fe—S propanediol dehydratase reactivase” refers to propanediol dehydratase reactivases requiring a bound Fe—S cluster for activity.

[0047] The term “isobutanol biosynthetic pathway” refers to an enzyme pathway to produce isobutanol from pyruvate.

[0048] The term “2-butanol biosynthetic pathway” refers to an enzyme pathway to produce 2-butanol from pyruvate.

[0049] The term “2-butanone biosynthetic pathway” refers to an enzyme pathway to produce 2-butanone from pyruvate.

[0050] There term “Dihydroxy-acid dehydratase”, also abbreviated DHAD , will refer to an enzyme that converts 2,3-dihydroxyisovalerate to α-ketoisovalerate.

[0051] The term “butanediol dehydratase”, also known as “diol dehydratase” or “propanediol dehydratase” refers to a polypeptide (or polypeptides) having an enzyme activity that catalyzes the conversion of 2,3-butanediol to 2-butanone. Butanediol dehydratases that do not utilize the cofactor adenosyl cobalamin (also known as coenzyme B12, or vitamin B12; although vitamin B12 may refer also to other forms of cobalamin that are not coenzyme B12) are coenzyme B12-independent diol dehydratases that require association with a diol dehydratase reactivase that is a Fe—S cluster protein. Examples of B12-independent diol dehydratases include those from Clostridium glycolicum (Hartmanis et al. (1986) Arch. Biochem. Biophys. 245:144-152), Clostridium butyricum (protein SEQ ID NO:191; coding region SEQ ID NO:190; O'Brien et al. (2004) Biochemistry 43:4635-4645), and Roseburia inulinivorans (coding: SEQ ID NO:15; protein: SEQ ID NO:43; disclosed in co-pending US Patent Pub No. US20090155870.

[0052] The term “propanediol dehydratase reactivase” , also known as “diol dehydratase reactivase” or “butanediol dehydratase reactivase” refers to a reactivating factor for diol dehydratase, an enzyme which undergoes suicide inactivation during catalysis. Diol dehydratase reactivases associated with coenzyme B12-independent diol dehydratases may be Fe—S cluster proteins. Examples include those from Clostridium glycolicum (Hartmanis et al. (1986) Arch. Biochem. Biophys. 245:144-152), Clostridium butyricum (protein SEQ ID NO:193; coding region SEQ ID NO:192; O'Brien et al. (2004) Biochemistry 43:4635-4645), and Roseburia inulinivorans (coding: SEQ ID NO:16; protein: SEQ ID NO:44; disclosed in commonly owned and co-pending US Patent Pub No. US20090155870).

[0053] The term “reduced expression” as it applies to the expression of a protein in a cell host will include those situations where the activity of the protein is diminished as compared with a wildtype form (as with antisense technology for example) or substantially eliminated as with gene disruption, deletion or inactivation for example.

[0054] The term “carbon substrate” or “fermentable carbon substrate” refers to a carbon source capable of being metabolized by host organisms of the present invention and particularly carbon sources selected from the group consisting of monosaccharides, oligosaccharides, polysaccharides, and one-carbon substrates or mixtures thereof.

[0055] The term “gene” refers to a nucleic acid fragment that is capable of being expressed as a specific protein, optionally including regulatory sequences preceding (5′ non-coding sequences) and following (3′ non-coding sequences) the coding sequence. “Native gene” refers to a gene as found in nature with its own regulatory sequences. “Chimeric gene” refers to any gene that is not a native gene, comprising regulatory and coding sequences that are not found together in nature. Accordingly, a chimeric gene may comprise regulatory sequences and coding sequences that are derived from different sources, or regulatory sequences and coding sequences derived from the same source, but arranged in a manner different than that found in nature. “Endogenous gene” refers to a native gene in its natural location in the genome of an organism. A “foreign gene” or “heterologous gene” refers to a gene not normally found in the host organism, but that is introduced into the host organism by gene transfer. “Heterologous gene” includes a native coding region, or portion thereof, that is reintroduced into the source organism in a form that is different from the corresponding native gene. For example, a heterologous gene may include a native coding region that is a portion of a chimeric gene including non-native regulatory regions that is reintroduced into the native host. Also a foreign gene can comprise native genes inserted into a non-native organism, or chimeric genes. A “transgene” is a gene that has been introduced into the genome by a transformation procedure.

[0056] As used herein the term “coding region” refers to a DNA sequence that codes for a specific amino acid sequence. “Suitable regulatory sequences” refer to nucleotide sequences located upstream (5′ non-coding sequences), within, or downstream (3′ non-coding sequences) of a coding sequence, and which influence the transcription, RNA processing or stability, or translation of the associated coding sequence. Regulatory sequences may include promoters, translation leader sequences, introns, polyadenylation recognition sequences, RNA processing site, effector binding site and stem-loop structure.

[0057] The term “promoter” refers to a DNA sequence capable of controlling the expression of a coding sequence or functional RNA. In general, a coding sequence is located 3′ to a promoter sequence. Promoters may be derived in their entirety from a native gene, or be composed of different elements derived from different promoters found in nature, or even comprise synthetic DNA segments. It is understood by those skilled in the art that different promoters may direct the expression of a gene in different tissues or cell types, or at different stages of development, or in response to different environmental or physiological conditions. Promoters which cause a gene to be expressed in most cell types at most times are commonly referred to as “constitutive promoters”. It is further recognized that since in most cases the exact boundaries of regulatory sequences have not been completely defined, DNA fragments of different lengths may have identical promoter activity.

[0058] The term “operably linked” refers to the association of nucleic acid sequences on a single nucleic acid fragment so that the function of one is affected by the other. For example, a promoter is operably linked with a coding sequence when it is capable of effecting the expression of that coding sequence (i.e., that the coding sequence is under the transcriptional control of the promoter). Coding sequences can be operably linked to regulatory sequences in sense or antisense orientation.

[0059] The term “expression”, as used herein, refers to the transcription and stable accumulation of sense (mRNA) or antisense RNA derived from the nucleic acid fragment of the invention. Expression may also refer to translation of mRNA into a polypeptide.

[0060] As used herein the term “transformation” refers to the transfer of a nucleic acid fragment into a host organism, resulting in genetically stable inheritance. Host organisms containing the transformed nucleic acid fragments are referred to as “transgenic” or “recombinant” or “transformed” organisms.

[0061] The terms “plasmid” and “vector” as used herein, refer to an extra chromosomal element often carrying genes which are not part of the central metabolism of the cell, and usually in the form of circular double-stranded DNA molecules. Such elements may be autonomously replicating sequences, genome integrating sequences, phage or nucleotide sequences, linear or circular, of a single- or double-stranded DNA or RNA, derived from any source, in which a number of nucleotide sequences have been joined or recombined into a unique construction which is capable of introducing a promoter fragment and DNA sequence for a selected gene product along with appropriate 3′ untranslated sequence into a cell.

[0062] As used herein the term “codon degeneracy” refers to the nature in the genetic code permitting variation of the nucleotide sequence without effecting the amino acid sequence of an encoded polypeptide. The skilled artisan is well aware of the “codon-bias” exhibited by a specific host cell in usage of nucleotide codons to specify a given amino acid. Therefore, when synthesizing a gene for improved expression in a host cell, it is desirable to design the gene such that its frequency of codon usage approaches the frequency of preferred codon usage of the host cell.

[0063] The term “codon-optimized” as it refers to genes or coding regions of nucleic acid molecules for transformation of various hosts, refers to the alteration of codons in the gene or coding regions of the nucleic acid molecules to reflect the typical codon usage of the host organism without altering the polypeptide encoded by the DNA.

[0064] As used herein, an “isolated nucleic acid fragment” or “isolated nucleic acid molecule” will be used interchangeably and will mean a polymer of RNA or DNA that is single- or double-stranded, optionally containing synthetic, non-natural or altered nucleotide bases. An isolated nucleic acid fragment in the form of a polymer of DNA may be comprised of one or more segments of cDNA, genomic DNA or synthetic DNA.

[0065] A nucleic acid fragment is “hybridizable” to another nucleic acid fragment, such as a cDNA, genomic DNA, or RNA molecule, when a single-stranded form of the nucleic acid fragment can anneal to the other nucleic acid fragment under the appropriate conditions of temperature and solution ionic strength. Hybridization and washing conditions are well known and exemplified in Sambrook, J., Fritsch, E. F. and Maniatis, T. Molecular Cloning: A Laboratory Manual, 2^{nd} ed., Cold Spring Harbor Laboratory: Cold Spring Harbor, N.Y. (1989), particularly Chapter 11 and Table 11.1 therein (entirely incorporated herein by reference). The conditions of temperature and ionic strength determine the “stringency” of the hybridization. Stringency conditions can be adjusted to screen for moderately similar fragments (such as homologous sequences from distantly related organisms), to highly similar fragments (such as genes that duplicate functional enzymes from closely related organisms). Post-hybridization washes determine stringency conditions. One set of preferred conditions uses a series of washes starting with 6×SSC, 0.5% SDS at room temperature for 15 min, then repeated with 2×SSC, 0.5% SDS at 45° C. for 30 min, and then repeated twice with 0.2×SSC, 0.5% SDS at 50° C. for 30 min. A more preferred set of stringent conditions uses higher temperatures in which the washes are identical to those above except for the temperature of the final two 30 min washes in 0.2×SSC, 0.5% SDS was increased to 60° C. Another preferred set of highly stringent conditions uses two final washes in 0.1×SSC, 0.1% SDS at 65° C. An additional set of stringent conditions include hybridization at 0.1×SSC, 0.1% SDS, 65° C. and washes with 2×SSC, 0.1% SDS followed by 0.1×SSC, 0.1% SDS, for example.

[0066] Hybridization requires that the two nucleic acids contain complementary sequences, although depending on the stringency of the hybridization, mismatches between bases are possible. The appropriate stringency for hybridizing nucleic acids depends on the length of the nucleic acids and the degree of complementation, variables well known in the art. The greater the degree of similarity or homology between two nucleotide sequences, the greater the value of Tm for hybrids of nucleic acids having those sequences. The relative stability (corresponding to higher Tm) of nucleic acid hybridizations decreases in the following order: RNA:RNA, DNA:RNA, DNA:DNA. For hybrids of greater than 100 nucleotides in length, equations for calculating Tm have been derived (see Sambrook et al., supra, 9.50-9.51). For hybridizations with shorter nucleic acids, i.e., oligonucleotides, the position of mismatches becomes more important, and the length of the oligonucleotide determines its specificity (see Sambrook et al., supra, 11.7-11.8). In one embodiment the length for a hybridizable nucleic acid is at least about 10 nucleotides. Preferably a minimum length for a hybridizable nucleic acid is at least about 15 nucleotides; more preferably at least about 20 nucleotides; and most preferably the length is at least about 30 nucleotides. Furthermore, the skilled artisan will recognize that the temperature and wash solution salt concentration may be adjusted as necessary according to factors such as length of the probe.

[0067] A “substantial portion” of an amino acid or nucleotide sequence is that portion comprising enough of the amino acid sequence of a polypeptide or the nucleotide sequence of a gene to putatively identify that polypeptide or gene, either by manual evaluation of the sequence by one skilled in the art, or by computer-automated sequence comparison and identification using algorithms such as BLAST (Altschul, S. F., et al., J. Mol. Biol., 215:403-410 (1993)). In general, a sequence of ten or more contiguous amino acids or thirty or more nucleotides is necessary in order to putatively identify a polypeptide or nucleic acid sequence as homologous to a known protein or gene. Moreover, with respect to nucleotide sequences, gene specific oligonucleotide probes comprising 20-30 contiguous nucleotides may be used in sequence-dependent methods of gene identification (e.g., Southern hybridization) and isolation (e.g., in situ hybridization of bacterial colonies or bacteriophage plaques). In addition, short oligonucleotides of 12-15 bases may be used as amplification primers in PCR in order to obtain a particular nucleic acid fragment comprising the primers. Accordingly, a “substantial portion” of a nucleotide sequence comprises enough of the sequence to specifically identify and/or isolate a nucleic acid fragment comprising the sequence. The instant specification teaches the complete amino acid and nucleotide sequence encoding particular proteins. The skilled artisan, having the benefit of the sequences as reported herein, may now use all or a substantial portion of the disclosed sequences for purposes known to those skilled in this art. Accordingly, the instant invention comprises the complete sequences as reported in the accompanying Sequence Listing, as well as substantial portions of those sequences as defined above.

[0068] The term “complementary” is used to describe the relationship between nucleotide bases that are capable of hybridizing to one another. For example, with respect to DNA, adenosine is complementary to thymine and cytosine is complementary to guanine.

[0069] The term “percent identity”, as known in the art, is a relationship between two or more polypeptide sequences or two or more polynucleotide sequences, as determined by comparing the sequences. In the art, “identity” also means the degree of sequence relatedness between polypeptide or polynucleotide sequences, as the case may be, as determined by the match between strings of such sequences. “Identity” and “similarity” can be readily calculated by known methods, including but not limited to those described in: 1.) Computational Molecular Biology (Lesk, A. M., Ed.) Oxford University: N.Y. (1988); 2.) Biocomputinq: Informatics and Genome Projects (Smith, D. W., Ed.) Academic: N.Y. (1993); 3.) Computer Analysis of Sequence Data, Part I (Griffin, A. M., and Griffin, H. G., Eds.) Humania: N.J. (1994); 4.) Sequence Analysis in Molecular Biology (von Heinje, G., Ed.) Academic (1987); and 5.) Sequence Analysis Primer (Gribskov, M. and Devereux, J., Eds.) Stockton: N.Y. (1991).

[0070] Preferred methods to determine identity are designed to give the best match between the sequences tested. Methods to determine identity and similarity are codified in publicly available computer programs. Sequence alignments and percent identity calculations may be performed using the MegAlign™ program of the LASERGENE bioinformatics computing suite (DNASTAR Inc., Madison, Wis.). Multiple alignment of the sequences is performed using the “Clustal method of alignment” which encompasses several varieties of the algorithm including the “Clustal V method of alignment” corresponding to the alignment method labeled Clustal V (described by Higgins and Sharp, CABIOS. 5:151-153 (1989); Higgins, D.G. et al., Comput. Appl. Biosci., 8:189-191 (1992)) and found in the MegAlign™ program of the LASERGENE bioinformatics computing suite (DNASTAR Inc.). For multiple alignments, the default values correspond to GAP PENALTY=10 and GAP LENGTH PENALTY=10. Default parameters for pairwise alignments and calculation of percent identity of protein sequences using the Clustal method are KTUPLE=1, GAP PENALTY=3, WINDOW=5 and DIAGONALS SAVED=5. For nucleic acids these parameters are KTUPLE=2, GAP PENALTY=5, WINDOW=4 and DIAGONALS SAVED=4. After alignment of the sequences using the Clustal V program, it is possible to obtain a “percent identity” by viewing the “sequence distances” table in the same program. Additionally the “Clustal W method of alignment” is available and corresponds to the alignment method labeled Clustal W (described by Higgins and Sharp, CABIOS. 5:151-153 (1989); Higgins, D.G. et al., Comput. Appl. Biosci. 8:189-191(1992)) and found in the MegAlign™ v6.1 program of the LASERGENE bioinformatics computing suite (DNASTAR Inc.). Default parameters for multiple alignment (GAP PENALTY=10, GAP LENGTH PENALTY=0.2, Delay Divergen Seqs(%)=30, DNA Transition Weight=0.5, Protein Weight Matrix=Gonnet Series, DNA Weight Matrix=IUB). After alignment of the sequences using the Clustal W program, it is possible to obtain a “percent identity” by viewing the “sequence distances” table in the same program.

[0071] It is well understood by one skilled in the art that many levels of sequence identity are useful in identifying polypeptides, from other species, wherein such polypeptides have the same or similar function or activity. Useful examples of percent identities include, but are not limited to: 55%, 60%, 65%, 70%, 75%, 80%, 85%, 90%, or 95%, or any integer percentage from 55% to 100% may be useful in describing the present invention, such as 55%, 56%, 57%, 58%, 59%, 60%, 81%, 62%, 63%, 64%, 65%, 66%, 67%, 68%, 69%, 70%, 71%, 72%, 73%, 74%, 75%, 76%, 77%, 78%, 79%, 80%, 81%, 82%, 83%, 84%, 85%, 86%, 87%, 88%, 89%, 90%, 91%, 92%, 93%, 94%, 95%, 96%, 97%, 98% or 99%. Suitable nucleic acid fragments not only have the above homologies but typically encode a polypeptide having at least 50 amino acids, preferably at least 100 amino acids, more preferably at least 150 amino acids, still more preferably at least 200 amino acids, and most preferably at least 250 amino acids.

[0072] The term “sequence analysis software” refers to any computer algorithm or software program that is useful for the analysis of nucleotide or amino acid sequences. “Sequence analysis software” may be commercially available or independently developed. Typical sequence analysis software will include, but is not limited to: 1.) the GCG suite of programs (Wisconsin Package Version 9.0, Genetics Computer Group (GCG), Madison, Wis.); 2.) BLASTP, BLASTN, BLASTX (Altschul et al., J. Mol. Biol., 215:403-410 (1990)); 3.) DNASTAR (DNASTAR, Inc. Madison, Wis.); 4.) Sequencher (Gene Codes Corporation, Ann Arbor, Mich.); and 5.) the FASTA program incorporating the Smith-Waterman algorithm (W. R. Pearson, Comput. Methods Genome Res., [Proc. Int. Symp.] (1994), Meeting Date 1992, 111-20. Editor(s): Suhai, Sandor. Plenum: New York, N.Y.). Within the context of this application it will be understood that where sequence analysis software is used for analysis, that the results of the analysis will be based on the “default values” of the program referenced, unless otherwise specified. As used herein “default values” will mean any set of values or parameters that originally load with the software when first initialized.

[0073] Standard recombinant DNA and molecular cloning techniques used here are well known in the art and are described by Sambrook, J., Fritsch, E. F. and Maniatis, T., Molecular Cloning: A Laboratory Manual, Second Edition, Cold Spring Harbor Laboratory Press, Cold Spring Harbor, N.Y. (1989) (hereinafter “Maniatis”); and by Silhavy, T. J., Bennan, M. L. and Enquist, L. W., Experiments with Gene Fusions, Cold Spring Harbor Laboratory Press, Cold Spring Harbor, N.Y. (1984); and by Ausubel, F. M. et al., Current Protocols in Molecular Biology, published by Greene Publishing Assoc. and Wiley-Interscience (1987). Additional methods used here are in Methods in Enzymology, Volume 194, Guide to Yeast Genetics and Molecular and Cell Biology (Part A, 2004, Christine Guthrie and Gerald R. Fink (Eds.), Elsevier Academic Press, San Diego, Calif.).

### Discovery of Improved Fe—S Cluster Protein Activity in Yeast

[0074] Proteins that contain a bound iron-sulfur cluster (Fe—S) that is required for their activity may have low activity when used in heterologous expression systems. Formation of Fe—S clusters and their transfer to apo-proteins is a multistep process involving at least several proteins including cysteine desulfurase, a scaffold protein and a chaperone. Thus a heterologous Fe—S protein may not be effectively composed by the endogenous host system. Applicants have discovered a way to increase activity of an Fe—S protein expressed as a heterologous protein in a yeast host cell. Applicants have found that by reducing production of an endogenous Fe—S protein in the yeast host cell, an improvement in activity of an expressed heterologous Fe—S cluster protein can be achieved. Expression in yeast of either heterologous bacterial, fungal or plant 2Fe-2S dihydroxy-acid dehydratase (DHAD) or Fe—S propanediol dehydratase reactivase (RdhtB) was improved when an endogenous gene encoding isopropylmalate dehydratase (LEU1) or an endogenous gene encoding dihydroxy-acid dehydratase (ILV3) was inactivated in the yeast host cells.

[0075] In yeast host cells with inactivation of a gene encoding an endogenous Fe—S protein, the activity of the expressed heterologous Fe—S protein may be increased to at least about 1.4 fold of the activity in a yeast host cell with no inactivation of Fe—S protein encoding gene. For example, the Kluyveromyces lactis DHAD had 1.4 fold activity in a LEU1 deletion host as compared to a host without the deletion; the Roseburia inulinivorans RdhtB had 1.7 fold comparative activity in a LEU deletion host as measured by the activated RdhtA protein activity (described below); Saccharomyces cerevisiae DHAD expressed in the cytosol had 1.5 fold comparative activity in a mitochondrial ILV3 deletion host; and Kluyveromyces lactis DHAD expressed in the cytosol had 7.4 fold comparative activity in a mitochondrial ILV3 deletion host.

Yeast Host Cells with Reduced Expression of Endogenous Fe—S Protein

[0076] Reduced endogenous Fe—S protein expression may be engineered in any yeast cell that is amenable to genetic manipulation. Examples include yeasts of Saccharomyces, Schizosaccharomyces, Hansenula, Candida, Kluyveromyces, Yarrowia and Pichia. Suitable strains include, but are not limited to, Saccharomyces cerevisiae, Schizosaccharomyces pombe, Kluyveromyces lactis, Kluyveromyces thermotolerans, Candida glabrata, Candida albicans, Pichia stipitis and Yarrowia lipolytica. Particularly suitable is Saccharomyces cerevisiae.

[0077] In any of these yeasts, any endogenous Fe—S protein may be a target for reduced expression. Fe—S proteins in yeast that may be targeted for reduced expression include, for example, the following proteins (with encoding gene): aconitase (ACO1), homoaconitase (LYS4), DHAD (ILV3), lipoate synthase (LIPS), biotin synthase (BIO2), ferredoxin maturation (YAH1), NADH ubiquinone oxidoreductase (NDI1), succinate dehydrogenase (SDH2), ubiquinol-cytochrome-c reductase (RIP1), isopropylmalate isomerase (LEU1), sulfite reductase (ECM17), glutamate dehydrogenase (GLT1), ABC protein Rli1 (RLI1), NTPase Nbp35 (NBP35), and hydrogenase-like protein (NARI1). Yeast cells with reduced expression of individual Fe—S proteins may require special conditions for growth such as supplementation of the growth medium with a particular nutrient, as is well known to one skilled in the art. For example, a strain with disruption of LEU1 is supplemented with leucine, a strain with disruption of DHAD is supplemented with leucine, isoleucine, and valine, and a strain with disruption of LYS4 is supplemented with lysine. Some strains with a disruption require no supplementation for growth. Particularly suitable Fe—S proteins that may be targeted for reduced expression include Isopropylmalate isomerase (LEU1), Dihydroxyacid dehydratase (ILV3), Sulfite reductase (ECM17), Glutamate dehydrogenase (GLT1), and Biotin synthase (BIO2). Reduced expression is engineered for at least one endogenous Fe—S protein, and two or more endogenous Fe—S proteins may be reduced.

[0078] LEU1 encodes isopropylmalate dehydratase, an enzyme belonging to EC 4.2.1.33 that is involved in branched chain amino acid biosynthesis, specifically synthesis of leucine. Any gene encoding an isopropylmalate dehydratase, which is an enzyme requiring a 4Fe-4S cluster for activity, may be inactivated in a yeast host cell of this disclosure. Examples of yeast LEU1 inactivation target genes and their encoded proteins are those from Saccharomyces cerevisiae (coding SEQ ID NO:1; protein SEQ ID NO:2), Schizosaccharomyces pombe (coding SEQ ID NO:3; protein SEQ ID NO:4), Candida galbrata strain CBS 138 (coding SEQ ID NO:5; protein SEQ ID NO:6), Candida albicans SC5314 (coding SEQ ID NO:7; protein SEQ ID NO:8), Kluyveromyces lactis (coding SEQ ID NO:; protein SEQ ID NO:10), Yarrowia lipolytica (coding SEQ ID NO:11; protein SEQ ID NO:12) and Pichia stipitis (coding SEQ ID NO:13; protein SEQ ID NO:14).

[0079] Similarly in any of the yeast hosts described herein, an endogenous ILV3 gene may be inactivated to reduce endogenous Fe—S protein expression. ILV3 encodes mitochondrial DHAD that is involved in branched chain amino acid biosynthesis. Mitochondrial DHAD is encoded by a nuclear gene, and has a mitochondrial targeting signal sequence so that it is transported to and localized in the mitochondrion. Any ILV3 gene may be inactivated in a yeast host cell of this disclosure. Examples of yeast ILV3 inactivation target genes and their encoded proteins are those from Saccharomyces cerevisiae YJM78 (coding SEQ ID NO:111; protein SEQ ID NO:112), Schizosaccharomyces pombe (coding SEQ ID NO:93; protein SEQ ID NO:94), Candida galbrata strain CBS 138 (coding SEQ ID NO:107; protein SEQ ID NO:108), Candida albicans SC5314 (coding SEQ ID NO:101; protein SEQ ID NO:102), Kluyveromyces lactis (coding SEQ ID NO:113; protein SEQ ID NO:114), Yarrowia lipolytica (coding SEQ ID NO:105; protein SEQ ID NO:106) and Pichia stipitis CBS 6054 (coding SEQ ID NO:103; protein SEQ ID NO:104).

[0080] Because genes encoding isopropylmalate dehydratases and DHAD enzymes genes are well known, and because of the prevalence of genomic sequencing, additional suitable species of these enzymes can be readily identified by one skilled in the art on the basis of sequence similarity using bioinformatics approaches. Typically BLAST (described above) searching of publicly available databases with known isopropylmalate dehydratase amino acid sequences, such as those provided herein, is used to identify these enzymes and their encoding sequences that may be targeted for inactivation in the present strains. For example, endogenous yeast isopropylmalate dehydratase and DHAD proteins having amino acid sequence identities of at least about 70-75%, 75%-80%, 80-85%, 85%-90%, 90%-95% or 98% A sequence identity to any of the isopropylmalate dehydratase proteins of SEQ ID NOs:2, 4, 6 ,8, 10, 12 and 14 and the DHAD proteins of SEQ ID NOs:94, 102, 104, 106, 108, 112, and 114 may have reduced expression in the present strains. Identities are based on the Clustal W method of alignment using the default parameters of GAP PENALTY=10, GAP LENGTH PENALTY=0.1, and Gonnet 250 series of protein weight matrix.

[0081] Additionally, the sequences of LEU1 coding regions and ILV3 provided herein may be used to identify other homologs in nature. For example each of the coding regions described herein may be used to isolate genes encoding homologous proteins. Isolation of homologous genes using sequence-dependent protocols is well known in the art. Examples of sequence-dependent protocols include, but are not limited to: 1.) methods of nucleic acid hybridization; 2.) methods of DNA and RNA amplification, as exemplified by various uses of nucleic acid amplification technologies [e.g., polymerase chain reaction (PCR), Mullis et al., U.S. Pat. No. 4,683,202; ligase chain reaction (LCR), Tabor, S. et al., Proc. Acad. Sci. USA 82:1074 (1985); or strand displacement amplification (SDA), Walker, et al., Proc. Natl. Acad. Sci. U.S.A., 89:392 (1992)]; and 3.) methods of library construction and screening by complementation.

[0082] For example, genes encoding similar proteins or polypeptides to the isopropylmalate dehydratase and DHAD encoding genes provided herein could be isolated directly by using all or a portion of the instant nucleic acid fragments as DNA hybridization probes to screen libraries from any desired organism using methodology well known to those skilled in the art. Specific oligonucleotide probes based upon the disclosed nucleic acid sequences can be designed and synthesized by methods known in the art (Maniatis, supra). Moreover, the entire sequences can be used directly to synthesize DNA probes by methods known to the skilled artisan (e.g., random primers DNA labeling, nick translation or end-labeling techniques), or RNA probes using available in vitro transcription systems. In addition, specific primers can be designed and used to amplify a part of (or full-length of) the instant sequences. The resulting amplification products can be labeled directly during amplification reactions or labeled after amplification reactions, and used as probes to isolate full-length DNA fragments by hybridization under conditions of appropriate stringency.

[0083] Typically, in PCR-type amplification techniques, the primers have different sequences and are not complementary to each other. Depending on the desired test conditions, the sequences of the primers should be designed to provide for both efficient and faithful replication of the target nucleic acid. Methods of PCR primer design are common and well known in the art (Thein and Wallace, “The use of oligonucleotides as specific hybridization probes in the Diagnosis of Genetic Disorders”, in Human Genetic Diseases: A Practical Approach, K. E. Davis Ed., (1986) pp 33-50, IRL: Herndon, Va.; and Rychlik, W., In Methods in Molecular Biology, White, B. A. Ed., (1993) Vol. 15, pp 31-39, PCR Protocols: Current Methods and Applications. Humania: Totowa, N.J.).

[0084] Generally two short segments of the described sequences may be used in polymerase chain reaction protocols to amplify longer nucleic acid fragments encoding homologous genes from DNA or RNA. The polymerase chain reaction may also be performed on a library of cloned nucleic acid fragments wherein the sequence of one primer is derived from the described nucleic acid fragments, and the sequence of the other primer takes advantage of the presence of the polyadenylic acid tracts to the 3′ end of the mRNA precursor encoding microbial genes.

[0085] Alternatively, the second primer sequence may be based upon sequences derived from the cloning vector. For example, the skilled artisan can follow the RACE protocol (Frohman et al., PNAS USA 85:8998 (1988)) to generate cDNAs by using PCR to amplify copies of the region between a single point in the transcript and the 3′ or 5′ end. Primers oriented in the 3′ and 5′ directions can be designed from the instant sequences. Using commercially available 3′ RACE or 5′ RACE systems (e.g., BRL, Gaithersburg, Md.), specific 3′ or 5′ cDNA fragments can be isolated (Ohara et al., PNAS USA 86:5673 (1989); Loh et al., Science 243:217 (1989)).

[0086] Alternatively, the provided isopropylmalate dehydratase and DHAD encoding sequences can be employed as hybridization reagents for the identification of homologs. The basic components of a nucleic acid hybridization test include a probe, a sample suspected of containing the gene or gene fragment of interest, and a specific hybridization method. Probes are typically single-stranded nucleic acid sequences that are complementary to the nucleic acid sequences to be detected. Probes are “hybridizable” to the nucleic acid sequence to be detected. The probe length can vary from 5 bases to tens of thousands of bases, and will depend upon the specific test to be done. Typically a probe length of about 15 bases to about 30 bases is suitable. Only part of the probe molecule need be complementary to the nucleic acid sequence to be detected. In addition, the complementarity between the probe and the target sequence need not be perfect. Hybridization does occur between imperfectly complementary molecules with the result that a certain fraction of the bases in the hybridized region are not paired with the proper complementary base.

[0087] Hybridization methods are well defined. Typically the probe and sample must be mixed under conditions that will permit nucleic acid hybridization. This involves contacting the probe and sample in the presence of an inorganic or organic salt under the proper concentration and temperature conditions. The probe and sample nucleic acids must be in contact for a long enough time that any possible hybridization between the probe and sample nucleic acid may occur. The concentration of probe or target in the mixture will determine the time necessary for hybridization to occur. The higher the probe or target concentration, the shorter the hybridization incubation time needed. Optionally, a chaotropic agent may be added. The chaotropic agent stabilizes nucleic acids by inhibiting nuclease activity. Furthermore, the chaotropic agent allows sensitive and stringent hybridization of short oligonucleotide probes at room temperature (Van Ness and Chen, Nucl. Acids Res. 19:5143-5151 (1991)). Suitable chaotropic agents include guanidinium chloride, guanidinium thiocyanate, sodium thiocyanate, lithium tetrachloroacetate, sodium perchlorate, rubidium tetrachloroacetate, potassium iodide and cesium trifluoroacetate, among others. Typically, the chaotropic agent will be present at a final concentration of about 3 M. If desired, one can add formamide to the hybridization mixture, typically 30-50% (v/v).

[0088] Various hybridization solutions can be employed. Typically, these comprise from about 20 to 60% volume, preferably 30%, of a polar organic solvent. A common hybridization solution employs about 30-50% v/v formamide, about 0.15 to 1 M sodium chloride, about 0.05 to 0.1 M buffers (e.g., sodium citrate, Tris-HCl, PIPES or HEPES (pH range about 6-9)), about 0.05 to 0.2% detergent (e.g., sodium dodecylsulfate), or between 0.5-20 mM EDTA, FICOLL (Pharmacia Inc.) (about 300-500 kdal), polyvinylpyrrolidone (about 250-500 kdal) and serum albumin. Also included in the typical hybridization solution will be unlabeled carrier nucleic acids from about 0.1 to 5 mg/mL, fragmented nucleic DNA (e.g., calf thymus or salmon sperm DNA, or yeast RNA), and optionally from about 0.5 to 2% wt/vol glycine. Other additives may also be included, such as volume exclusion agents that include a variety of polar water-soluble or swellable agents (e.g., polyethylene glycol), anionic polymers (e.g., polyacrylate or polymethylacrylate) and anionic saccharidic polymers (e.g., dextran sulfate).

[0089] Nucleic acid hybridization is adaptable to a variety of assay formats. One of the most suitable is the sandwich assay format. The sandwich assay is particularly adaptable to hybridization under non-denaturing conditions. A primary component of a sandwich-type assay is a solid support. The solid support has adsorbed to it or covalently coupled to it immobilized nucleic acid probe that is unlabeled and complementary to one portion of the sequence.

[0090] Protein and nucleic acid encoding sequences for any of the other Fe—S proteins that may be targeted for reduced activity in a yeast cell of the invention may be identified using bioinformatics and other methods well known to one skilled in the art. For example, aconitase sequences are identified by keyword searching in bioinformatics databases. Several sequences identified by this method are those from Saccharomyces cerevisiae (coding SEQ ID NO:153; protein SEQ ID NO:154), Schizosaccharomyces pombe on chromosome II (coding SEQ ID NO:155; protein SEQ ID NO:156), Schizosaccharomyces pombe on chromosome I (coding SEQ ID NO:157; protein SEQ ID NO:158), Kluyveromyces lactis (coding SEQ ID NO:15; protein SEQ ID NO:160), Candida albicans SC5314 (coding SEQ ID NO:161; protein SEQ ID NO:162), Yarrowia lipolytica (coding SEQ ID NO:163; protein SEQ ID NO:164), Pichia stipitis CBS 6054 (coding SEQ ID NO:165; protein SEQ ID NO:166), Candida galbrata CBS 138 chromosome F (coding SEQ ID NO:167; protein SEQ ID NO:168), Candida galbrata CBS 138 chromosome D (coding SEQ ID NO:169; protein SEQ ID NO:170), and Candida galbrata CBS 138 chromosome K (coding SEQ ID NO:171; protein SEQ ID NO:172).

[0091] Genes encoding Fe—S proteins, for example LEU1, ILV3, or ACO1 may be disrupted in any yeast cell using genetic modification. Many methods for genetic modification of target genes are known to one skilled in the art and may be used to create the present yeast strains. Modifications that may be used to reduce or eliminate expression of a target protein are disruptions that include, but are not limited to, deletion of the entire gene or a portion of the gene, inserting a DNA fragment into the gene (in either the promoter or coding region) so that the protein is not expressed or expressed at lower levels, introducing a mutation into the coding region which adds a stop codon or frame shift such that a functional protein is not expressed, and introducing one or more mutations into the coding region to alter amino acids so that a non-functional or a less enzymatically active protein is expressed. In addition, expression of a gene may be blocked by expression of an antisense RNA or an interfering RNA, and constructs may be introduced that result in cosuppression. In addition, the synthesis or stability of the transcript may be lessened by mutation. Similarly the efficiency by which a protein is translated from mRNA may be modulated by mutation. All of these methods may be readily practiced by one skilled in the art making use of the known or identified coding sequences such as LEU1 or ILV3.

[0092] DNA sequences surrounding a LEU1, ILV3, or ACO1 coding sequence are also useful in some modification procedures and are available for yeasts such as for Saccharomycse cerevisiae in the complete genome sequence coordinated by Genome Project ID9518 of Genome Projects coordinated by NCBI (National Center for Biotechnology Information) with identifying GOPID 13838. Additional examples of yeast genomic sequences include that of Yarrowia lipolytica, GOPIC 13837, and of Candida albicans, which is included in GPID 10771,10701 and 16373. Additional genomes have been completely sequenced and annotated and are publicly available for the following yeast strains Candida glabrata CBS 138, Kluyveromyces lactis NRRL Y-1140, Pichia stipitis CBS 6054, and Schizosaccharomyces pombe 972h-.

[0093] In particular, DNA sequences surrounding a target coding sequence, such as LEU1 or ILV3, are useful for modification methods using homologous recombination. For example, in this method flanking sequences are placed bounding a selectable marker gene to mediate homologous recombination whereby the marker gene replaces the target gene. Also partial target gene sequences and flanking sequences bounding a selectable marker gene may be used to mediate homologous recombination whereby the marker gene replaces a portion of the target gene. In addition, the selectable marker may be bounded by site-specific recombination sites, so that following expression of the corresponding site-specific recombinase, the resistance gene is excised from the target gene without reactivating the latter. The site-specific recombination leaves behind a recombination site which disrupts expression of the target gene encoded protein. The homologous recombination vector may be constructed to also leave a deletion in the target gene following excision of the selectable marker, as is well known to one skilled in the art.

[0094] Deletions may be made using mitotic recombination as described in Wach et al. ((1994) Yeast 10:1793-1808). This method involves preparing a DNA fragment that contains a selectable marker between genomic regions that may be as short as 20 bp, and which bound a target DNA sequence. This DNA fragment can be prepared by PCR amplification of the selectable marker gene using as primers oligonucleotides that hybridize to the ends of the marker gene and that include the genomic regions that can recombine with the yeast genome. The linear DNA fragment can be efficiently transformed into yeast and recombined into the genome resulting in gene replacement including with deletion of the target DNA sequence (as described in Methods in Enzymology, v194, pp 281-301 (1991)).

[0095] Moreover, promoter replacement methods may be used to exchange the endogenous transcriptional control elements allowing another means to modulate expression such as described in Mnaimneh et al. ((2004) Cell 118(1):31-44) and in Example 12 herein.

[0096] In addition, a target gene in any yeast cell may be disrupted using random mutagenesis, which is followed by screening to identify strains with reduced target gene encided activity. Using this type of method, the DNA sequence of for example the LEU1, ILV3, or any other region of the genome affecting expression of a target Fe—S protein, need not be known.

[0097] Methods for creating genetic mutations are common and well known in the art and may be applied to the exercise of creating mutants. Commonly used random genetic modification methods (reviewed in Methods in Yeast Genetics, 2005, Cold Spring Harbor Laboratory Press, Cold Spring Harbor, N.Y.) include spontaneous mutagenesis, mutagenesis caused by mutator genes, chemical mutagenesis, irradiation with UV or X-rays, or transposon mutagenesis.

[0098] Chemical mutagenesis of yeast commonly involves treatment of yeast cells with one of the following DNA mutagens: ethyl methanesulfonate (EMS), nitrous acid, diethyl sulfate, or N-methyl-N′-nitro-N-nitroso-guanidine (MNNG).These methods of mutagenesis have been reviewed in Spencer et al (Mutagenesis in Yeast, 1996, Yeast Protocols: Methods in Cell and Molecular Biology. Humana Press, Totowa, N.J.). Chemical mutagenesis with EMS may be performed as described in Methods in Yeast Genetics, 2005, Cold Spring Harbor Laboratory Press, Cold Spring Harbor, N.Y. Irradiation with ultraviolet (UV) light or X-rays can also be used to produce random mutagenesis in yeast cells. The primary effect of mutagenesis by UV irradiation is the formation of pyrimidine dimers which disrupt the fidelity of DNA replication. Protocols for UV-mutagenesis of yeast can be found in Spencer et al (Mutagenesis in Yeast, 1996, Yeast Protocols: Methods in Cell and Molecular Biology. Humana Press, Totowa, N.J.). Introduction of a mutator phenotype can also be used to generate random chromosomal mutations in yeast. Common mutator phenotypes can be obtained through disruption of one or more of the following genes: PMS1, MAG1, RAD18 or RAD51. Restoration of the non-mutator phenotype can be easily obtained by insertion of the wildtype allele. Collections of modified cells produced from any of these or other known random mutagenesis processes may be screened for reduced Fe—S protein activity.

### Heterologous Fe—S Proteins

[0099] Any bacterial, fungal or plant 2Fe-2S cluster dihydroxy-acid dehydratase (DHAD) and any Fe—S propanediol dehydratase reactivase may be expressed as a heterologous protein in a yeast host cell engineered as disclosed herein for reduced endogenous Fe—S cluster protein expression, and increased activity may be obtained. A heterologous protein includes one that is expressed in a manner differently from expression of a corresponding endogenous protein. For example in yeast, endogenous DHAD is encoded by ILV3 in the nucleus and the expressed DHAD protein has a mitochondrial targeting signal sequence such that the protein is localized in the mitochondrion. An Fe—S cluster is added to the DHAD protein in the mitochondrion for its activity in branched chain amino acid biosynthesis. It is desirable to express DHAD activity in the cytosol for participation in biosynthetic pathways that are localized in the cytosol. Cytosolic expression of DHAD in yeast is heterologous expression since the native protein is localized in the mitochondrion. For example, heterologous expression of the Saccharomyces cerevisiae DHAD in S. cerevisiae is obtained by expressing the S. cerevisiae DHAD coding region with the mitochondrial targeting signal removed, such that the protein remains in the cytosol. 2Fe-2S DHADs that may be used in the present disclosure include those from fungi and plants. Representative bacterial, fungal or plant 2Fe-2S DHADs are listed in Tables 1, 2, and 4. Bacterial, fungal or plant 2Fe-2S DHADs with amino acid sequence identities of 95% or greater were removed from the analysis providing this list for simplification. However, any sequences with 95% or greater amino acid identities to any of the sequences listed in Tables 1, 2, and 4 are useful in the present invention. The analysis used to obtain 2Fe-2S DHADs is described in commonly owned and co-pending U.S. Patent Application No. 61/100,792, which is herein incorporated by reference. The analysis is as follows: Therein a Profile Hidden Markov Model (HMM) was prepared based on amino acid sequences of eight functionally verified DHADs. These DHADs are from Nitrosomonas europaea (DNA SEQ ID NO:174; Protein SEQ ID NO:175), Synechocystis sp. PCC6803 (DNA SEQ ID:176; Protein SEQ ID NO:177), Streptococcus mutans (DNA SEQ ID NO:178; Protein SEQ ID NO:179), Streptococcus thermophilus (DNA SEQ ID NO:180; protein SEQ ID No:181), Ralstonia metallidurans (DNA SEQ ID NO:182; protein SEQ ID NO:183), Ralstonia eutropha (DNA SEQ ID NO:184; protein SEQ ID NO:185), and Lactococcus lactis (DNA SEQ ID NO:186; protein SEQ ID NO:187). In addition the DHAD from Flavobacterium johnsoniae (DNA SEQ ID NO:188; protein SEQ ID NO:189) was found to have dihydroxy-acid dehydratase activity when expressed in E. coli and was used in making the Profile. The Profile HMM is prepared using the HMMER software package (The theory behind profile HMMs is described in R. Durbin, S. Eddy, A. Krogh, and G. Mitchison, Biological sequence analysis: probabilistic models of proteins and nucleic acids, Cambridge University Press, 1998; Krogh et al., 1994; J. Mol. Biol. 235:1501-1531), following the user guide which is available from HMMER (Janelia Farm Research Campus, Ashburn, Va.). The output of the HMMER software program is a Profile Hidden Markov Model (HMM) that characterizes the input sequences, given in Table 9.

[0100] Any protein that matches the Profile HMM with an E value of <10⁻⁵ is a DHAD related protein, which includes 4Fe-4S DHADs, 2Fe-2S DHADs, arabonate dehydratases, and phosphogluconate dehydratases. Sequences matching the Profile HMM are then analyzed for the presence of the three conserved cysteines, corresponding to positions 56, 129, and 201 in the Streptococcus mutans DHAD. The presence of all three conserved cysteines is characteristic of proteins having a [2Fe-2S] ²⁺cluster. Proteins having the three conserved cysteines include arabonate dehydratases and 2Fe-2S DHADs. The 2Fe-2S DHADs may be distinguished from the arabonate dehydratases by analyzing for signature conserved amino acids found to be present in the 2Fe-2S DHADs or in the arabonate dehydratases at positions corresponding to the following positions in the Streptococcus mutans DHAD amino acid sequence. These signature amino acids are in 2Fe-2S DHADs or in arabonate dehydratases, respectively, at the following positions (with greater than 90% occurance): 88 asparagine vs glutamic acid; 113 not conserved vs glutamic acid; 142 arginine or asparagine vs not conserved; 165: not conserved vs glycine; 208 asparagine vs not conserved; 454 leucine vs not conserved; 477 phenylalanine or tyrosine vs not conserved; and 487 glycine vs not conserved.

[0101] The proteins identified by this process that have a fungal or plant origin, such as SEQ ID NOs:46, 48, 50, 52, 54, 56, 58, 60, 62, 64, 66, 68, 70, 72, 74, 76, 78, 80, 82, 84, 86, 88, 90, 92, 94, 96, 98, 100, 102, 104, 106, 108, 110, 112, 114, 116, 118, 120, 122, 124, 126, 128, 130, 132, 134, 136, 138, 140, 142, 144, 146, 148, 150 and 152 may be used in the present invention, as well as any protein with amino acid identity of at least about 95%, 96%, 97%, 98%, or or (:)/o to any of these sequences. Particularly suitable is the DHAD from Kluyveromyces lactis (SEQ ID NO:114) and DHADs with at least about 90% amino acid sequence identity to SEQ ID NO:114 using the Clustal W method of alignment using the default parameters of GAP PENALTY=10, GAP LENGTH PENALTY=0.1, and Gonnet 250 series of protein weight matrix over the full length of the protein sequence.

[0102] The DHAD proteins of SEQ ID NOs:175, 177, 179, 181, 183, 185, 187, and 189 may also be used in the present invention, as well as any protein with amino acid identity of at least about 95%, 96%, 97%, 98%, or 99% to any of these sequences using the Clustal W method of alignment using the default parameters of GAP PENALTY=10, GAP LENGTH PENALTY=0.1, and Gonnet 250 series of protein weight matrix over the full length of the protein sequence.

[0103] In addition, fungal or plant 2Fe-2S DHADs that may be used in the present invention may be identified by their position in a fungal or plant 2Fe-2S DHAD branch of a phylogenetic tree of DHAD related proteins. In addition, 2Fe-2S DHADs that may be used may be identified using sequence comparisons with any of the fungal or plant 2Fe-2S DHADs whose sequences are provided herein, where sequence identity may be at least about 80%-85%, 85%-90%, 90%-95% or 95%-99%.

[0104] Additionally, the sequences of fungal or plant 2Fe-2S DHADs provided herein may be used to identify other homologs in nature. For example each of the DHAD encoding nucleic acid fragments given herein as SEQ ID NOs:45, 47, 49, 51, 53, 55, 57, 59, 61, 63, 65, 67, 69, 71, 73, 75, 77, 79, 81, 83, 85, 87, 89, 91, 93, 95, 97, 99, 101, 103, 105, 107, 109, 111, 113, 115, 117, 11, 121, 123, 125, 127, 129, 131, 133, 135, 137, 13, 141, 143, 145, 147, 149 and 151 may be used to isolate genes encoding homologous proteins as described above for the LEU1 coding region.

[0105] The coenzyme B12-independent propanediol deydratase reactivase of Roseburia inulinivorans is a protein requiring an Fe—S cluster for activity. This protein, RdhtB, is disclosed in co-pending US Patent Pub No. US20090155870, which is herein incorporated by reference. RdhtB reactivates a coenzyme B12-independent propanediol deydratase of Roseburia inulinivorans, which is named RdhtA and is also disclosed in commonly owned and co-pending US Patent Pub No. US20090155870. The activity of RdhtB may be assessed by assaying the activity of RdhtA, since RdhtB is required for RdhtA activity. Activity of RdhtB, and therefore of RdhtA, is improved by expressing in a yeast host with reduced endogenous Fe—S protein expression disclosed herein. Heterologous expression of any coenzyme B12-independent propanediol deydratase reactivase that requires an Fe—S cluster for activity may be improved in a yeast strain having reduced endogenous Fe—S protein expression. A coenzyme B12-independent propanediol deydratase reactivase may be readily identified by one skilled in the art by assessing propanediol deydratase activity of the associated propanediol deydratase enzyme in the presence or absence of coenzyme B12. An example is a diol dehydratase reactivase of Clostridium butyricum (coding region SEQ ID NO:192; protein SEQ ID NO:193).

[0106] Other coenzyme B12-independent propanediol deydratase reactivases that may be used may be identified through bioinformatics analysis of sequences as compared to that of RdhtB SEQ ID NO:44 by one skilled in the art. Proteins with coenzyme B12-independent propanediol deydratase reactivase activity and sequence identity to SEQ ID NO:44 of at least about 80%-85%, 85%-90%, 90%-95% or 95%-99% may be used. Particularly suitable are those that are at least about 90% identical to the amino acid sequence as set forth in SEQ ID NO:44 using the Clustal W method of alignment using the default parameters of GAP PENALTY=10, GAP LENGTH PENALTY=0.1, and Gonnet 250 series of protein weight matrix over the full length of the protein sequence.

[0107] In addition, other coenzyme B12-independent propanediol deydratase reactivase homologs that may be used may be identified using the RdhtB coding region (SEQ ID NO:16) by methods as described above for the LEU1 coding region.

### Expression of Heterologous Fe—S Proteins

[0108] Expression is achieved by transforming with a sequence encoding an Fe—S protein. The coding region to be expressed may be codon optimized for the target host cell, as well known to one skilled in the art. Methods for gene expression in yeast are known in the art (see for example Methods in Enzymology, Volume 194, Guide to Yeast Genetics and Molecular and Cell Biology (Part A, 2004, Christine Guthrie and Gerald R. Fink (Eds.), Elsevier Academic Press, San Diego, Calif.). Expression of genes in yeast typically requires a promoter, operably linked to a coding region of interest, and a transcriptional terminator. A number of yeast promoters can be used in constructing expression cassettes for genes in yeast, including, but not limited to promoters derived from the following genes: CYC1, HIS3, GAL1, GAL10, ADH1, PGK, PHO5, GAPDH, ADC1, TRP1, URA3, LEU2, ENO, TPI, CUP1, FBA, GPD, GPM, and AOX1. Suitable transcriptional terminators include, but are not limited to FBAt, GPDt, GPMt, ERG10t, GAL1t, CYC1, and ADH1.

[0109] Suitable promoters, transcriptional terminators, and coding regions may be cloned into E. coli-yeast shuttle vectors, and transformed into yeast cells. These vectors allow strain propagation in both E. coli and yeast strains. Typically the vector used contains a selectable marker and sequences allowing autonomous replication or chromosomal integration in the desired host. Typically used plasmids in yeast are shuttle vectors pRS423, pRS424, pRS425, and pRS426 (American Type Culture Collection, Rockville, Md.), which contain an E. coli replication origin (e.g., pMB1), a yeast 2μorigin of replication, and a marker for nutritional selection. The selection markers for these four vectors are His3 (vector pRS423), Trp1 (vector pRS424), Leu2 (vector pRS425) and Ura3 (vector pRS426). Construction of expression vectors with a chimeric gene encoding the described Fe—S protein coding regions may be performed by either standard molecular cloning techniques in E. coli or by the gap repair recombination method in yeast.

[0110] The gap repair cloning approach takes advantage of the highly efficient homologous recombination in yeast. Typically, a yeast vector DNA is digested (e.g., in its multiple cloning site) to create a “gap” in its sequence. A number of insert DNAs of interest are generated that contain a ≧21 bp sequence at both the 5′ and the 3′ ends that sequentially overlap with each other, and with the 5′ and 3′ terminus of the vector DNA. For example, to construct a yeast expression vector for “Gene X”, a yeast promoter and a yeast terminator are selected for the expression cassette. The promoter and terminator are amplified from the yeast genomic DNA, and Gene X is either PCR amplified from its source organism or obtained from a cloning vector comprising Gene X sequence. There is at least a 21 bp overlapping sequence between the 5′ end of the linearized vector and the promoter sequence, between the promoter and Gene X, between Gene X and the terminator sequence, and between the terminator and the 3′ end of the linearized vector. The “gapped” vector and the insert DNAs are then co-transformed into a yeast strain and plated on the medium containing the appropriate compound mixtures that allow complementation of the nutritional selection markers on the plasmids. The presence of correct insert combinations can be confirmed by PCR mapping using plasmid DNA prepared from the selected cells. The plasmid DNA isolated from yeast (usually low in concentration) can then be transformed into an E. coli strain, e.g. TOP10, followed by mini preps and restriction mapping to further verify the plasmid construct. Finally the construct can be verified by sequence analysis.

[0111] Like the gap repair technique, integration into the yeast genome also takes advantage of the homologous recombination system in yeast. Typically, a cassette containing a coding region plus control elements (promoter and terminator) and auxotrophic marker is PCR-amplified with a high-fidelity DNA polymerase using primers that hybridize to the cassette and contain 40-70 base pairs of sequence homology to the regions 5′ and 3′ of the genomic area where insertion is desired. The PCR product is then transformed into yeast and plated on medium containing the appropriate compound mixtures that allow selection for the integrated auxotrophic marker. For example, to integrate “Gene X” into chromosomal location “Y”, the promoter-coding regionX-terminator construct is PCR amplified from a plasmid DNA construct and joined to an autotrophic marker (such as URA3) by either SOE PCR or by common restriction digests and cloning. The full cassette, containing the promoter-coding regionX-terminator-URA3 region, is PCR amplified with primer sequences that contain 40-70 bp of homology to the regions 5′ and 3′ of location “Y” on the yeast chromosome. The PCR product is transformed into yeast and selected on growth media lacking uracil. Transformants can be verified either by colony PCR or by direct sequencing of chromosomal DNA.

[0112] Any coding regions expressed in the present yeast cells may be codon optimized for expression in the specific host yeast cell being engineered as is well known to one skilled in the art. For example, for expression of the K. lactis and P. stipitis ILV3 coding regions in S. cerevisiae, each was codon optimized for S. cerevisiae expression in Example 1 herein.

Product Biosynthesis with Improved Heterologous Fe—S Protein Activity

[0113] Production of any product that has an Fe—S protein contributing to its biosynthetic pathway may benefit from the improved activity disclosed herein of a heterologous expressed Fe—S protein in a yeast host with reduced endogenous Fe—S protein expression. For example, DHAD provides a step in pathways for biosynthesis of isobutanol, and RdhtB contributes to a biosynthetic pathway to produce 2-butanone or 2-butanol.

[0114] Biosynthetic pathways including a step performed by DHAD for synthesis of isobutanol are disclosed in commonly owned and co-pending US Patent Application publication US 20070092957 A1, which is herein incorporated by reference. A diagram of the disclosed isobutanol biosynthetic pathways is provided in FIG. 1. Production of isobutanol in a strain disclosed herein benefits from increased DHAD activity. As described in US Patent Pub No. US20070092957 A1, steps in an example isobutanol biosynthetic pathway include conversion of:

[0115] pyruvate to acetolactate (FIG. 1 pathway step a) as catalyzed for example by acetolactate synthase;

[0116] acetolactate to 2,3-dihydroxyisovalerate (FIG. 1 pathway step b) as catalyzed for example by acetohydroxy acid isomeroreductase;

[0117] 2,3-dihydroxyisovalerate to α-ketoisovalerate (FIG. 1 pathway step c) as catalyzed for example by acetohydroxy acid dehydratase also called DHAD;

[0118] α-ketoisovalerate to isobutyraldehyde (FIG. 1 pathway step d) as catalyzed for example by branched-chain α-keto acid decarboxylase; and

[0119] isobutyraldehyde to isobutanol (FIG. 1 pathway step e) as catalyzed for example by branched-chain alcohol dehydrogenase.

[0120] The substrate to product conversions, and enzymes involved in these reactions, for steps f, g, h, I, j, and k of alternative pathways are described in US 20070092957 A1.

[0121] Genes that may be used for expression of the enzymes for the isobutanol pathways are described in US 20070092957 A1, and additional genes that may be used can be identified by one skilled in the art through bioinformatics or experimentally as described above. The preferred use in all three pathways of ketol-acid reductoisomerase (KARI) enzymes with particularly high activities are disclosed in commonly owned and co-pending US Patent Pub No. US20080261230. Examples of high activity KARIs disclosed therein are those from Vibrio cholerae (DNA: SEQ ID NO:35; protein SEQ ID NO:36), Pseudomonas aeruginosa PAO1, (DNA: SEQ ID NO:37; protein SEQ ID NO:38), and Pseudomonas fluorescens PF5 (DNA: SEQ ID NO:39; protein SEQ ID NO:40).

[0122] Additionally described in US 20070092957 A1 are construction of chimeric genes and genetic engineering of yeast, exemplified by Saccharomyces cerevisiae, for isobutanol production using the disclosed biosynthetic pathways.

[0123] A biosynthetic pathway including propanediol dehydratase for synthesis of 2-butanone and 2-butanol is disclosed in commonly owned and co-pending US Patent Pub No. US20070292927A1, which is herein incorporated by reference. A diagram of the disclosed 2-butanone and 2-butanol biosynthetic pathway is provided in FIG. 2. 2-Butanone is the product made when the last depicted step of converting 2-butanone to 2-butanol is omitted. Production of 2-butanone or 2-butanol in a strain disclosed herein benefits from increased coenzyme B12-independent propanediol dehydratase reactivase activity. As described in US Patent Pub No. US20070292927A1, steps in the disclosed biosynthetic pathway include conversion of:

[0124] pyruvate to acetolactate (FIG. 2 step a) as catalyzed for example by acetolactate synthase;

[0125] acetolactate to acetoin (FIG. 2 step b) as catalyzed for example by acetolactate decarboxylase;

[0126] acetoin to 2,3-butanediol (FIG. 2 step i) as catalyzed for example by butanediol dehydrogenase;

[0127] 2,3-butanediol to 2-butanone (FIG. 2 step j) as catalyzed for example by diol dehydratase glycerol dehydratase, or propanediol dehydratase; and

[0128] 2-butanone to 2-butanol (FIG. 2 step f) as catalyzed for example by butanol dehydrogenase.

[0129] Genes that may be used for expression of these enzymes are described in US Patent Pub No. US20070292927A1. The use in this pathway in yeast of the butanediol dehydratase from Roseburia inulinivorans, RdhtA, (protein SEQ ID NO:43, coding region SEQ ID NO:15) is disclosed in commonly owed and co-pending US Patent Pub No. US20090155870. This enzyme is used in conjunction with the butanediol dehydratase reactivase from Roseburia inulinivorans, RdhtB, (protein SEQ ID NO:44, coding region SEQ ID NO:16). This butanediol dehydratase is desired in many hosts because it does not require coenzyme B₁₂.

[0130] Additionally described in US Patent Pub No. US20090155870are construction of chimeric genes and genetic engineering of yeast for 2-butanol production using the US 20070292927A1 disclosed biosynthetic pathway.

### Fermentation Media

[0131] Yeasts disclosed herein may be grown in fermentation media for production of a product having an Fe—S protein as part of the biosynthetic pathway. Fermentation media must contain suitable carbon substrates. Suitable substrates may include but are not limited to monosaccharides such as glucose and fructose, oligosaccharides such as lactose or sucrose, polysaccharides such as starch or cellulose or mixtures thereof and unpurified mixtures from renewable feedstocks such as cheese whey permeate, cornsteep liquor, sugar beet molasses, and barley malt. Additionally the carbon substrate may also be one-carbon substrates such as carbon dioxide, or methanol for which metabolic conversion into key biochemical intermediates has been demonstrated. In addition to one and two carbon substrates methylotrophic organisms are also known to utilize a number of other carbon containing compounds such as methylamine, glucosamine and a variety of amino acids for metabolic activity. For example, methylotrophic yeast are known to utilize the carbon from methylamine to form trehalose or glycerol (Bellion et al., Microb. Growth C1 Compd., [Int. Symp.], 7th (1993), 415-32. Editor(s): Murrell, J. Collin; Kelly, Don P. Publisher: Intercept, Andover, UK). Similarly, various species of Candida will metabolize alanine or oleic acid (Sulter et al., Arch. Microbiol. 153:485-489 (1990)). Hence it is contemplated that the source of carbon utilized in the present invention may encompass a wide variety of carbon containing substrates and will only be limited by the choice of organism.

[0132] Although it is contemplated that all of the above mentioned carbon substrates and mixtures thereof are suitable in the present invention, preferred carbon substrates are glucose, fructose, and sucrose.

[0133] In addition to an appropriate carbon source, fermentation media must contain suitable minerals, salts, cofactors, buffers and other components, known to those skilled in the art, suitable for the growth of the cultures and promotion of the enzymatic pathway necessary for production of the desired product.

### Culture Conditions

[0134] Typically cells are grown at a temperature in the range of about 20° C. to about 37° C. in an appropriate medium. Suitable growth media in the present invention are common commercially prepared media such as broth that includes yeast nitrogen base, ammonium sulfate, and dextrose as the carbon/energy source) or YPD Medium, a blend of peptone, yeast extract, and dextrose in optimal proportions for growing most Saccharomyces cerevisiae strains. Other defined or synthetic growth media may also be used and the appropriate medium for growth of the particular microorganism will be known by one skilled in the art of microbiology or fermentation science.

[0135] Suitable pH ranges for the fermentation are between pH 3.0 to pH 7.5, where pH 4.5.0 to pH 6.5 is preferred as the initial condition.

[0136] Fermentations may be performed under aerobic or anaerobic conditions, where anaerobic or microaerobic conditions are preferred.

[0137] The amount of butanol produced in the fermentation medium can be determined using a number of methods known in the art, for example, high performance liquid chromatography (HPLC) or gas chromatography (GC).

### Industrial Batch and Continuous Fermentations

[0138] The present process employs a batch method of fermentation. A classical batch fermentation is a closed system where the composition of the medium is set at the beginning of the fermentation and not subject to artificial alterations during the fermentation. Thus, at the beginning of the fermentation the medium is inoculated with the desired organism or organisms, and fermentation is permitted to occur without adding anything to the system. Typically, however, a “batch” fermentation is batch with respect to the addition of carbon source and attempts are often made at controlling factors such as pH and oxygen concentration. In batch systems the metabolite and biomass compositions of the system change constantly up to the time the fermentation is stopped. Within batch cultures cells moderate through a static lag phase to a high growth log phase and finally to a stationary phase where growth rate is diminished or halted. If untreated, cells in the stationary phase will eventually die. Cells in log phase generally are responsible for the bulk of production of end product or intermediate.

[0139] A variation on the standard batch system is the Fed-Batch system. Fed-Batch fermentation processes are also suitable in the present invention and comprise a typical batch system with the exception that the substrate is added in increments as the fermentation progresses. Fed-Batch systems are useful when catabolite repression is apt to inhibit the metabolism of the cells and where it is desirable to have limited amounts of substrate in the media. Measurement of the actual substrate concentration in Fed-Batch systems is difficult and is therefore estimated on the basis of the changes of measurable factors such as pH, dissolved oxygen and the partial pressure of waste gases such as CO₂. Batch and Fed-Batch fermentations are common and well known in the art and examples may be found in Thomas D. Brock in Biotechnology: A Textbook of Industrial Microbiology, Second Edition (1989) Sinauer Associates, Inc., Sunderland, Mass., or Deshpande, Mukund V., Appl. Biochem. Biotechnol., 36:227, (1992), herein incorporated by reference.

[0140] Although the present invention is performed in batch mode it is contemplated that the method would be adaptable to continuous fermentation methods. Continuous fermentation is an open system where a defined fermentation medium is added continuously to a bioreactor and an equal amount of conditioned media is removed simultaneously for processing. Continuous fermentation generally maintains the cultures at a constant high density where cells are primarily in log phase growth.

[0141] Continuous fermentation allows for the modulation of one factor or any number of factors that affect cell growth or end product concentration. For example, one method will maintain a limiting nutrient such as the carbon source or nitrogen level at a fixed rate and allow all other parameters to moderate. In other systems a number of factors affecting growth can be altered continuously while the cell concentration, measured by media turbidity, is kept constant. Continuous systems strive to maintain steady state growth conditions and thus the cell loss due to the medium being drawn off must be balanced against the cell growth rate in the fermentation. Methods of modulating nutrients and growth factors for continuous fermentation processes as well as techniques for maximizing the rate of product formation are well known in the art of industrial microbiology and a variety of methods are detailed by Brock, supra.

[0142] The present invention may be practiced using either batch, fed-batch or continuous processes and known modes of fermentation are suitable. Additionally, it is contemplated that cells may be immobilized on a substrate as whole cell catalysts and subjected to fermentation conditions for 1-butanol production.

Methods for Butanol Isolation from the Fermentation Medium

[0143] Bioproduced butanol may be isolated from the fermentation medium using methods known in the art. For example, solids may be removed from the fermentation medium by centrifugation, filtration, decantation, or the like. Then, the butanol may be isolated from the fermentation medium, which has been treated to remove solids as described above, using methods such as distillation, liquid-liquid extraction, or membrane-based separation. Because butanol forms a low boiling point, azeotropic mixture with water, distillation can only be used to separate the mixture up to its azeotropic composition. Distillation may be used in combination with another separation method to obtain separation around the azeotrope. Methods that may be used in combination with distillation to isolate and purify butanol include, but are not limited to, decantation, liquid-liquid extraction, adsorption, and membrane-based techniques. Additionally, butanol may be isolated using azeotropic distillation using an entrainer (see for example Doherty and Malone, Conceptual Design of Distillation Systems, McGraw Hill, New York, 2001).

[0144] The butanol-water mixture forms a heterogeneous azeotrope so that distillation may be used in combination with decantation to isolate and purify the butanol. In this method, the butanol containing fermentation broth is distilled to near the azeotropic composition. Then, the azeotropic mixture is condensed, and the butanol is separated from the fermentation medium by decantation. The decanted aqueous phase may be returned to the first distillation column as reflux. The butanol-rich decanted organic phase may be further purified by distillation in a second distillation column.

[0145] The butanol may also be isolated from the fermentation medium using liquid-liquid extraction in combination with distillation. In this method, the butanol is extracted from the fermentation broth using liquid-liquid extraction with a suitable solvent. The butanol-containing organic phase is then distilled to separate the butanol from the solvent.

[0146] Distillation in combination with adsorption may also be used to isolate butanol from the fermentation medium. In this method, the fermentation broth containing the butanol is distilled to near the azeotropic composition and then the remaining water is removed by use of an adsorbent, such as molecular sieves (Aden et al. Lignocellulosic Biomass to Ethanol Process Design and Economics Utilizing Co-Current Dilute Acid Prehydrolysis and Enzymatic Hydrolysis for Corn Stover, Report NREL/TP-510-32438, National Renewable Energy Laboratory, June 2002).

[0147] Additionally, distillation in combination with pervaporation may be used to isolate and purify the butanol from the fermentation medium. In this method, the fermentation broth containing the butanol is distilled to near the azeotropic composition, and then the remaining water is removed by pervaporation through a hydrophilic membrane (Guo et al., J. Membr. Sci. 245, 199-210 (2004)).

### EXAMPLES

[0148] The present invention is further defined in the following Examples. It should be understood that these Examples, while indicating preferred embodiments of the invention, are given by way of illustration only. From the above discussion and these Examples, one skilled in the art can ascertain the essential characteristics of this invention, and without departing from the spirit and scope thereof, can make various changes and modifications of the invention to adapt it to various uses and conditions.

### General Methods

[0149] Standard recombinant DNA and molecular cloning techniques used in the Examples are well known in the art and are described by Sambrook, J., Fritsch, E. F. and Maniatis, T. Molecular Cloning: A Laboratory Manual; Cold Spring Harbor Laboratory Press: Cold Spring Harbor, N.Y. (1989) (Maniatis) and by T. J. Silhavy, M. L. Bennan, and L. W. Enquist, Experiments with Gene Fusions, Cold Spring Harbor Laboratory Press, Cold Spring Harbor, N.Y. (1984) and by Ausubel, F. M. et al., Current Protocols in Molecular Biology, pub. by Greene Publishing Assoc. and Wiley-Interscience (1987), and by Methods in Yeast Genetics, 2005, Cold Spring Harbor Laboratory Press, Cold Spring Harbor, N.Y.

[0150] Materials and methods suitable for the maintenance and growth of bacterial cultures are well known in the art. Techniques suitable for use in the following Examples may be found as set out in Manual of Methods for General Bacteriology (Phillipp Gerhardt, R. G. E. Murray, Ralph N. Costilow, Eugene W. Nester, Willis A. Wood, Noel R. Krieg and G. Briggs Phillips, eds), American Society for Microbiology, Washington, DC. (1994)) or by Thomas D. Brock in Biotechnology: A Textbook of Industrial Microbiology, Second Edition, Sinauer Associates, Inc., Sunderland, Mass. (1989). All reagents, restriction enzymes and materials used for the growth and maintenance of microbial cells were obtained from Aldrich Chemicals (Milwaukee, Wis.), BD Diagnostic Systems (Sparks, Md.), Life Technologies (Rockville, Md.), or Sigma Chemical Company (St. Louis, Mo.) unless otherwise specified. Microbial strains were obtained from The American Type Culture Collection (ATCC), Manassas, Va., unless otherwise noted. All the oligonucleotide primers were synthesized by Sigma-Genosys (Woodlands, Tex.) or Integrated DNA Technologies (Coralsville, Iowa).

[0151] Synthetic complete medium is described in Amberg, Burke and Strathern, 2005, Methods in Yeast Genetics, Cold Spring Harbor Laboratory Press, Cold Spring Harbor, N.Y.

### HPLC

[0152] Analysis for fermentation by-product composition is well known to those skilled in the art. For example, one high performance liquid chromatography (HPLC) method utilizes a Shodex SH-1011 column with a Shodex SH-G guard column (both available from Waters Corporation, Milford, Mass.), with refractive index (RI) detection. Chromatographic separation is achieved using 0.01 M H₂SO₄ as the mobile phase with a flow rate of 0.5 mL/min and a column temperature of 50° C. Isobutanol retention time is 47.6 minutes.

[0153] The meaning of abbreviations is as follows: “s” means second(s), “min” means minute(s), “h” means hour(s), “psi” means pounds per square inch, “nm” means nanometers, “d” means day(s), “μL” means microliter(s), “mL” means milliliter(s), “L” means liter(s), “mm” means millimeter(s), “nm” means nanometers, “mM” means millimolar, “M” means molar, “mmol” means millimole(s), “μmol” means micromole(s)“, “g” means gram(s), “μg” means microgram(s) and “ng” means nanogram(s), “PCR” means polymerase chain reaction, “OD” means optical density, “OD₆₀₀” means the optical density measured at a wavelength of 600 nm, “kDa” means kilodaltons, “g” means the gravitation constant, “bp” means base pair(s), “kbp” means kilobase pair(s), “% w/v” means weight/volume percent, % v/v″ means volume/volume percent, “wt %” means percent by weight, “HPLC” means high performance liquid chromatography, and “GC” means gas chromatography. The term “molar selectivity” is the number of moles of product produced per mole of sugar substrate consumed and is reported as a percent.

### Example 1

### Expression of DHAD from K. Lactis in LEU1 Deletion Strain of S. Cerevisiae

[0154] The yeast LEU1 gene encodes isopropylmalate dehydratase, an enzyme that requires an Fe—S cluster for its function. The impact of LEU1 deletion on DHAD activity expressed from the Kluyveromyces lactis DHAD coding region was examined in this example. For gene expression in yeast, the shuttle vector pNY13 (SEQ ID NO:29) derived from pRS423 was used. This shuttle vector contained an F1 origin of replication (1423 to 1879) for maintenance in E. coli and a 2 micron origin (nt 7537 to 8881) for replication in yeast. The vector has an FBA promoter (nt 2111 to 3110) and FBA terminator (nt 4316 to 5315). In addition, it carries the HIS3 marker (nt 504 to 1163) for selection in yeast and ampicillin resistance marker (nt 6547 to 7404) for selection in E. coli. pNY9 is the same vector with a URA3 marker replacing the HIS3 marker.

[0155] The ILV3 coding region for DHAD from Kluyveromyces lactis was synthesized with codon-optimization for expression in S. cerevisiae by DNA 2.0 (Menlo Park, Calif.). The cloned synthesized sequence was PCR amplified. During amplification, a portion of the mitochondrial signal peptide for the DHAD at the N-terminus was deleted by using ilv3(K)(0)-F(delet) as the forward primer with ilv3(K)(o)-R as the reverse primer, resulting in a coding region for cytoplasmic expression (SEQ ID NO:173). In addition, an SphI site was incorporated in the forward primer, while a NotI site was included in the reverse primer. The PCR product was cloned into the shuttle vectors pNY9 and pNY13 so that the ILV3 coding region was under the control of the FBA promoter. Both PCR product and each vector (pNY9, pNY13) were digested with SphI and NotI. After digestion, the components were ligated, and the ligation mixture was transformed into TOP10 competent cells (Invitrogen). Transformants were selected in LB agar plates supplemented with 100 μg/ml of ampicillin. Positive clones were screened by PCR with the forward and reverse primers described above. The resulting plasmids were designated as pRS423::FBAp-ILV3(KL) and pRS426::FBAp-ILV3(KL), derived from plasmids pNY13 and pNY9, respectively.

[0156] To study the expression of the DHAD from K. lactis in S. cerevisiae the expression vector pRS423::FBAp-ILV3(KL) along with an empty vector pRS426 were transformed into strains BY4743 and BY4743 leu1::kanMX4 (ATCC 4034377). The competent cell preparation and transformation were based on the Frozen Yeast Transformation kit from Zymo Research. The transformants were selected on agar plates with yeast synthetic medium lacking histidine and uracil (Teknova). For enzymatic assays, the strains carrying the expression construct and the empty vector pRS426 were first grown overnight in 5 ml synthetic complete yeast medium lacking histidine and uracil. The 5 ml overnight cultures were transferred into 100 ml of medium in a 250 ml flask. The cultures were harvested when they reached 1 to 2 O.D. at 600 nm. The samples were washed with 10 ml of 20 mM Tris (pH 7.5) and then resuspended in 1 ml of the same Tris buffer. The samples were transferred into 2.0 ml tubes containing 0.1 mm silica (Lysing Matrix B, MP biomedicals). The cells were then broken in a bead-beater (BIO101). The supernatant was obtained by centrifugation in a microfuge at 13,000 rpm at 4° C. for 30 minutes. Typically, 0.06 to 0.1 mg of crude extract protein was used in a DHAD assay. Protein in the crude extracts was determined by Bradford assay with Coomassie stain.

### Dihydroxy-Acid Dehydratase Enzyme Assay

[0157] The in vitro DHAD enzyme assay is a variation on the assay described in Flint et al. (J. Biol. Chem. (1993) 268:14732-14742.). The assay was performed in a 1.6 ml total volume and consisted of: 800 μl 2× buffer (100 mM Tris pH 8.0, 20 mM MgCl₂), 160 μl 10× substrate (15.6 mg/ml dihydroxyisovalerate), crude extract (typically 50-200 μg protein), and water. The reaction was incubated at 37° C. At 0, 30, 60, and 90 minute time intervals, 350 μl aliquots of the reaction were removed and incubated with 350 μl of 0.05% dinitrophenyhydrazine in 1N HCl for 30 minutes at 25° C. To quench the reaction, 350 μl of 4N sodium hydroxide was added to the reaction mixture, and the reaction was centrifuged at 15,000×g for 2 minutes. The supernatant was transferred to a plastic disposable cuvette and absorbance at 540 nm was measured in a spectrophotometer. The amount of α-ketoisovalerate (KIV) produced was determined by entering the absorbance into the linear regression equation obtained from a standard curve of α-ketoisovalerate. The amount of KIV produced at each time point was plotted to determine the rate of production. The slope of the linear regression was then used to calculate specific activity using the formula:

Specific activity calculation=(slope of KIV production/1000)/mg protein per 1.6 mL reaction=mmol/min*mg

[0158] The dehydratase from K. lactis had a specific activity in the range of 0.2 to 0.35 μmol min⁻¹ mg⁻¹ when expressed in yeast strain BY4743 (Δleu1). In contrast, this enzyme had a specific activity in the range of only 0.14 μmol min⁻¹ mg⁻¹ when expressed in the parent yeast strain BY4743. Strains BY4743 (Δleu1) and wildtype BY4743 containing empty vectors pRS423 or pRS426 had a background of activity in the range of 0.03 to 0.1 μmol min⁻¹ mg⁻¹.

### Example 2

### Expression of Diol Dehydratase in LEU1 Deletion Strain of S. Cerevisiae

[0159] A coenzyme B12-independent propanediol dehydratase is disclosed in commonly owned and co-pending US Patent Pub No. US20090155870. The sequences encoding this coenzyme B12-independent (S-adenosylmethionine (SAM)-dependent) propanediol dehydratase (SEQ ID NO:15) and its putative associated reactivase (SEQ ID NO:16) in the bacterium Roseburia inulinivorans [Scott et al.(2006) J. Bacteriol.188:4340-9], hereafter referred to as rdhtA and rdhtB, respectively, were synthesized as one DNA fragment (SEQ ID NO:17) by standard methods and cloned into an E. coli vector (by DNA2.0, Inc., Menlo Park, Calif.). This clone was used as a PCR template to prepare separate RdhtA and RdhtB coding region fragments. The RdhtA coding region for the diol dehydratase was amplified by PCR using primers N695 and N696 (SEQ ID NOs:18 and 19). The RdhtB coding region for the diol dehydratase activase, was amplified by PCR using primers N697 and N698 (SEQ ID NOs:20 and 21). The two DNA fragments were combined with a dual terminator DNA fragment (SEQ ID NO:22) that has an ADH terminator (SEQ ID NO:23) and a CYC1 terminator (SEQ ID NO:24) adjacent to each other in opposing orientation using SOE PCR (Horton et al. (1989) Gene 77:61-68). The dual terminator fragment was isolated as a 0.6 kb fragment following Pacl digestion of pRS426::FBA-ILV5+GPM-kivD (described in co-owned and co-pending US Patent Publication 20070092957 A1, Example 17). The resulting 4 kb DNA fragment had the RdhtA and RdhtB coding regions in opposing orientation on either side of the dual terminator, with the 3′end of each coding region adjacent to the dual terminator sequence. This DNA fragment was then cloned by gap repair methodology (Ma et al. (1987) Genetics 58:201-216) into the S. cerevisiae shuttle vector pRS426::FBA-ILV5+GPM-kivD that was prepared by digestion with BbvCl to remove the ILV5 and kivD coding regions and dual terminator sequence between their 3′ ends. The resulting plasmid, pRS426::RdhtAB (below), contained the RdhtA gene under the control of the S. cerevisiae FBA promoter (SEQ ID NO:25) and the RdhtB gene under control of the S. cerevisiae GPM promoter (SEQ ID NO:26).

[0160] Plasmids pRS426 and pRS426::RdhtAB were introduced into S. cerevisiae strains BY4743 (ATCC 201390) and BY4743 leu1::kanMX4 (ATCC 4034377) by standard techniques (Methods in Yeast Genetics, 2005, Cold Spring Harbor Laboratory Press, Cold Spring Harbor, N.Y., pp. 201-202). Cells were plated on synthetic complete medium lacking uracil to select for transformants. Transformants were tested for diol dehydratase activity using an in vivo assay as follows. Patched cells grown on solid medium were used to inoculate liquid media (20 ml) in petri plates. Media used were synthetic complete minus uracil with and without addition of 5 g/L 1,2-propanediol 9Aldrich Cat. No. 398039). The petri plates were transferred to an Anaeropack™ System jar (Mitsubishi Gas Chemical Co. Cat. No.50-70). An anaerobic environment (<0.1% oxygen) was generated using Pack-Anaero sachets (Mitsubishi Gas Chemical Co. Cat. No. 10-01). After 48 hours, culture supernatants were sampled, filtered and analyzed by HPLC as described in General Methods. Propanol, which has a retention time of 38.8 minutes, was observed in culture supernatants of strains carrying pRS426::RdhtAB when 1,2-propanediol was provided in the medium. The results given in Table 5 show that more propanol was produced in the supernatants of the strain also carrying the LEU1 deletion than in the strain without the LEU1 deletion. Statistical analysis gave a P score of less than 0.0005.

TABLE 5
Propanol production with propanediol dehydratase/reactivase
expression in yeast with and without LEU1 knockout.

| | 1,2-propanediol | Propanol |
|---|---|---|
| Strain | Added | Peak Area |
| BY4743 | 5 g/L | 19472 ± 1403 |
| Δleu1::kanMX4/pRS426::RdhtAB | | (n = 6) |
| BY4743 | 0 g/L | 2478 |
| Δleu1::kanMX4/pRS426::RdhtAB | | (n = 1) |
| BY4743/pRS426::RdhtAB | 5 g/L | 11830 ± 1983 |
| | | (n = 6) |
| BY4743/pRS426::RdhtAB | 0 g/L | 2369 |
| | | (n = 1) |
| BY4743 Δleu1::kanMX4/pRS426 | 5 g/L | 2633 |
| | | (n = 1) |
| BY4743/pRS426 | 5 g/L | 2841 |
| | | (n = 1) |

### Example 3

### Improving Cytosolic Dihydroxy-Acid Dehydratase (DHAD) Activity in S. Cerevisiae Through a Disruption of Mitochondrial ILV3

### Vector/Host Construction

[0161] In S. cerevisiae ILV3 encodes the mitochondrial dihydroxy-acid dehydratase that is involved in branched chain amino acid biosynthesis. To reduce background from endogenous ILV3 expression for in vitro enzymatic assays in S. cerevisiae, an ilv3::URA3 disruption cassette was constructed by PCR amplification of the URA3 marker from pRS426 (ATCC No. 77107) with primers “ILV3::URA3 F” and “ILV3::URA3 R”, given as SEQ ID NO:30 and 31. These primers produced a 1.4 kb URA3 PCR product that contained 70 by 5′ and 3′ extensions identical to sequences upstream and downstream of the ILV3 chromosomal locus for homologous recombination. The PCR product was transformed into BY4741 cells (ATCC 201388) using standard genetic techniques (Methods in Yeast Genetics, 2005, Cold Spring Harbor Laboratory Press, Cold Spring Harbor, N.Y., pp. 201-202) and resulting transformants were maintained on synthetic complete media lacking uracil and supplemented with 2% glucose at 30° C. Transformants were screened by PCR using primers “ILV3 F Check” and “URA3 REV Check”, given as SEQ ID NOs:32 and 33, to verify integration at the correct site and disruption of the endogenous ILV3 locus. The correct transformants had the genotype: BY4741 ilv3::URA3.

[0162] Construction of plasmid pRS423::FBAp-ILV3(KL) and pRS426::FBAp-ILV3(KL) were described in Example 1. Construction of pRS423::CUP1-alsS+FBA-ILV3 has been described in co-owned and co-pending US Patent Publication US20070092957 A1, Example 17 which is herein incorporated by reference. pRS423::CUP1-alsS+FBA-ILV3 is the same plasmid as pRS423::CUP1p-alsS-FBAp-ILV3. This construction contains a chimeric gene containing the S. cerevisiae CUP1 promoter (SEQ ID NO:34), alsS coding region from Bacillus subtilis (SEQ ID NO:27), and CYC1 terminator (SEQ ID NO:24); and also a chimeric gene containing the S. cerevisiae FBA promoter (SEQ ID NO:25), ILV3 coding region from S. cerevisiae lacking the mitochondrial targeting signal coding sequence (SEQ ID NO:111) and ADH1 terminator (SEQ ID NO:23).

### Preparation of Samples

[0163] Plasmid vectors pRS423::CUP1p-alsS-FBAp-ILV3 and pRS423::FBAp-ILV3(KL) were transformed into strain BY4741 ilv3::URA3 using standard genetic techniques (Methods in Yeast Genetics, 2005, Cold Spring Harbor Laboratory Press, Cold Spring Harbor, N.Y.) and maintained on synthetic complete media lacking histidine. Plasmid vectors pRS423::CUP1p-alsS-FBAp-ILV3 and pRS426::FBAp-ILV3(KL) were also transformed into strain BY4741. Aerobic cultures were grown in 1000 ml flasks containing 200 ml synthetic complete media lacking histidine and supplemented with 2% glucose in an Innova4000 incubator (New Brunswick Scientific, Edison, N.J.) at 30° C. and 225 rpm. Cultures were harvested at OD600 measurements of 1.0-2.0 and pelleted by centrifugation at 6000×g for 10 minutes. Cell pellets were washed with 10 mM Tris-HCl, pH 8.0 and pellets were stored at −80° C. until assayed for activity. Cell free extracts were prepared by standard bead beating method using 1 ml of 0.5 mm beads and 1.5 ml of yeast cell suspension. Protein concentration in the extracts was determined by Bradford assay with Coomassie stain. DHAD enzyme assays and specific activity calculations were performed as described in Example 1. The results given in Table 6 show that there was higher DHAD activity in the ILV3 deletion cells than in cells without the ILV3 deletion.

TABLE 6
DHAD activity in yeast with and without ILV3 deletion.

| | | Average |
|---|---|---|
| | Specific | Specific |
| | Activity | Activity |
| Strain | (μmol/min*mg) | (μmol/min*mg) |
| BY4741 | 0.018 | 0.013 |
| | 0.014 | |
| | 0.008 | |
| BY4741 pRS423::CUP1p-alsS-FBAp- | 0.018 | 0.019 |
| ILV3 | | |
| | 0.020 | |
| BY4741 pRS426::FBAp-ILV3(KL) | 0.040 | 0.038 |
| | 0.036 | |
| BY4741 ilv3::URA3 | 0.00006 | 0.00041 |
| | 0.00075 | |
| BY4741 ilv3::URA3 pRS423::CUP1p- | 0.030 | 0.029 |
| alsS-FBAp-ILV3 | | |
| | 0.028 | |
| BY4741 ilv3::URA3 pRS423::FBAp- | 0.317 | 0.281 |
| ILV3(KL) | | |
| | 0.244 | |

### Verification of Alpha-Ketoisovalerate Formation by HPLC

[0164] Formation of alpha-ketoisovalerate from the in vitro DHAD enzyme assays was accomplished using HPLC and semicarbizide derivatization. DHAD enzyme assays were performed in a 1.6 ml total volume and consisted of: 800 μl 2× buffer (100mM Tris pH 8.0, 20mM MgCl₂), 160 μl 10×substrate (15.6 mg/m I dihydroxyisovalerate), crude extract (typically 50-200 μg protein), and water. The reactions were incubated at 37° C. At time intervals of zero and 90 minutes 350 μl aliquots of the reactions were removed, transferred to ice, and centrifuged at 13,000×g for 2 minutes at 4° C. to remove precipitated protein. The supernatants were transferred to ice-chilled Microcon YM-10 (Sigma) spin columns and centrifuged at 13,000 ×g for 20 minutes at 4° C. to remove enzymes and soluble proteins. The flowthroughs were mixed with 100 μl derivatizing reagent (1% semicarbizide hydrochloride and 1.5% sodium acetate trihydrate) and incubated at room temperature for 15 minutes. The reactions were spun through CoStar spin filters (CoStar, 0.22 μm filter) at 13,000×g for 5 minutes at 4° C. to remove any precipitates. The flowthroughs were transferred to HPLC vials for analysis.

[0165] Analysis of derivatized alpha-ketoisovalerate was conduced using reverse phase chromatography on a Supelco LC-18 column with Superguard LC-18-DB guard column (Supelco; 25 cm×4.6 mm, 5 μm). Injection volumes were 10 μl. Mobile phases were methanol (A) and 50 mM NaOAc pH 7.2. The gradient program utilized is given in Table 7, with detection at 250 nm.

TABLE 7
Gradient used for derivatized alpha-ketoisovalerate HPLC assay

| Time | Flow | % NaOAc | | |
|---|---|---|---|---|
| (min) | (ml/min) | (50 mM) | % MEOH | Curve |
| Initial | 1.0 | 95 | 5 | |
| 5 | 1.0 | 95 | 5 | 6 |
| 20 | 1.0 | 70 | 30 | 6 |
| 21 | 1.0 | 0 | 100 | 6 |
| 25 | 1.0 | 0 | 100 | 6 |
| 26 | 1.0 | 95 | 5 | 6 |
| 35 | 1.0 | 95 | 5 | 6 |

The retention time of semicarbizide-derivatized alpha-ketoisovalerate was 11.5 minutes.

[0166] The results, which are given in Table 8, confirmed that KIV was produced in the cells, as detected in the indirect assay for specific activity above. The amount of KIV listed in the DHAD Assay column is the amount determined indirectly in the 90 min sample for the activity assay described above in determining the specific activity. This amount of KIV correlates well with the amount detected in the HPLC assay.

TABLE 8
Comparison of KIV detected in DHAD
activity assay and by HPLC.

| | keto-isovalerate production (μM) | |
|---|---|---|
| Strain | DHAD Assay | HPLC |
| BY4741 ilv3::URA3 pRS423::FBAp- | 256 | 256 |
| ILV3(KL) | | |
| BY4741 ilv3::URA3 pRS423::FBAp- | 162 | 163 |
| ILV3(KL) | | |

### Example 4

### Expression of Dihydroxy-Acid Dehydratase from S. Mutans in Yeast

[0167] The shuttle vector pRS423 FBA ilvD(Strep) (SEQ ID NO:194) was used for the expression of DHAD from Streptococcus mutans. This shuttle vector contained an F1 origin of replication (1423 to 1879) for maintenance in E. coli and a 2 micron origin (nt 8082 to 9426) for replication in yeast. The vector has an FBA promoter (nt 2111 to 3108; SEQ ID NO:195) and FBA terminator (nt 4861 to 5860). In addition, it carries the His marker (nt 504 to 1163) for selection in yeast and ampicillin resistance marker (nt 7092 to 7949) for selection in E. coli. The ilvD coding region (nt 3116 to 4828) from Streptococcus mutans UA159 (ATCC 700610) is between the FBA promoter and FBA terminator forming a chimeric gene for expression.

[0168] To test the expression of the DHAD from Streptococcus mutans in yeast strain BY4741 (known in the art and obtainable from ATCC #201388), the expression vector pRS423 FBA IlvD(Strep) was transformed in combination with empty vector pRS426 into BY4741 cells (obtainable from ATCC, # 201388). The transformants were grown on synthetic medium lacking histidine and uracil (Teknova). Growth on liquid medium for assay was carried out by adding 5 ml of an overnight culture into 100 ml medium in a 250 ml flask. The cultures were harvested when they reached 1 to 2 O.D. at 600 nm. The samples were washed with 10 ml of 20 mM Tris (pH 7.5) and then resuspended in 1 ml of the same Tris buffer. The samples were transferred into 2.0 ml tubes containing 0.1 mm silica (Lysing Matrix B, MP biomedicals). The cells were then broken in a bead-beater (BIO101). The supernatant was obtained by centrifugation in a microfuge at 13,000 rpm at 4° C. for 30 minutes. Typically, 0.06 to 0.1 mg of crude extract protein was used in DHAD assay at 37° C. as described by Flint and Emptage (J. Biol. Chem. (1988) 263(8): 3558-64) using dinitrophenylhydrazine. The dehydratase from Streptococcus mutans had a specific activity of 0.24 μmol min⁻¹ mg⁻¹ when expressed in yeast. A control strain containing empty vectors pRS423 and pRS426 had a background of activity in the range of 0.03 to 0.06 μmol min⁻¹ mg⁻¹.

### Example 5

### Expression of the IlvD Gene from L. Lactis in Yeast

[0169] The ilvD coding region from L. lactis was amplified with the forward primer IlvD(LI)-F (SEQ ID NO:196) and reverse primer IlvD(LI)-R (SEQ ID NO:197). The amplified fragment was cloned into the shuttle vector pNY13by gap repair. pNY13 (SEQ ID NO:198) was derived from pRS423. This shuttle vector contained an F1 origin of replication (1423 to 1879) for maintanence in E. coli and a 2 micron origin (nt 7537 to 8881) for replication in yeast. The vector has an FBA promoter (nt 2111 to 3110) and FBA terminator (nt 4316 to 5315). In addition, it carries the His marker (nt 504 to 1163) for selection in yeast and Ampicillin resistance marker (nt 6547 to 7404) for selection in E. coli.

[0170] Positive clones were selected based on amplification with the forward and reverse primers for the ilvD coding region and further confirmed by sequencing. The new construct was designated as pRS423 FBA ilvD(L. lactis). This construct was transformed into yeast strain BY4743 (ΔLEU1) (Open Biosystems, Huntsville, Ala.; Catalog #YSC1021-666629) along with the empty vector pRS426 as described in Example 6. The growth and assay of yeast strains containing the expression vector were also carried out according to the procedures as described in Example 4. The dihydroxy-acid dehydratase activity in yeast strains with the L. lactis IlvD gene was determined to be in the range of 0.05 to 0.17 μmol min⁻¹ mg⁻¹. This activity was slightly above the control. Complementation experiments were carried out to investigate the expression of this DHAD and DHADs from other bacteria (example 8).

### Example 6

### Complementation of Yeast ILV3 Deletion Strain with Bacterial DHADs.

[0171] The endogenous DHAD enzyme of S. cerevisiae is encoded by the ILV3 gene and the protein is targeted to the mitochondrion. Deletion of this gene results in loss of endogenous DHAD activity and provides a test strain where expression of heterologous cytosolic DHAD activity can be readily assessed. Deletion of ILV3 results in an inability of the strain to grow in the absence of branched-chained amino acids. Expression of different bacterial DHADs was assayed by determining their ability to complement the yeast ILV3 deletion strain such that it grows in the absence of branched-chained amino acids.

[0172] Expression shuttle vectors containing ilvD gene sequences encoding DHADs from the bacteria listed in Table 10 were constructed. The basic elements of these expression constructs were the same as the pRS423 FBA ilvD(strep) vector described in Example 4. Each of the ilvD coding regions was prepared by PCR as described in Example 2 of US Patent Application publication US20100081154A1, which is herein incorporated by reference, and cloned to replace the Streptococcus mutans ilvD coding region in pRS423 FBA ilvD(Strep) creating the plasmids listed in Table 10. These expression constructs were transformed into the ILV3 deletion strain, BY4741 ilv3::URA3 and was prepared as follows. An ilv3::URA3 disruption cassette was constructed by PCR amplification of the URA3 marker from pRS426 (ATCC No. 77107) with primers “ILV3::URA3 F” and “ILV3::URA3 R”, given as SEQ ID NOs: 199 and 200. These primers produced a 1.4 kb URA3 PCR product that contained 70 by 5′ and 3′ extensions identical to sequences upstream and downstream of the ILV3 chromosomal locus for homologous recombination. The PCR product was transformed into BY4741 cells (ATCC 201388) using standard genetic techniques (Methods in Yeast Genetics, 2005, Cold Spring Harbor Laboratory Press, Cold Spring Harbor, N.Y., pp. 201-202) and resulting transformants were maintained on synthetic complete media lacking uracil and supplemented with 2% glucose at 30° C. Transformants were screened by PCR using primers “ILV3 F Check” and “URA3 REV Check”, given as SEQ ID NOs:201 and 202, to verify integration at the correct site and disruption of the endogenous ILV3 locus.

[0173] The transformants with bacterial DHADs in Table 10 were selected on plates with yeast synthetic medium lacking histidine. Colonies selected were then patched onto plates lacking valine, leucine and isoleucine. Strains containing the expression vectors listed in Table 10 were able to grow on these plates lacking the branched chain amino acids, while the control strain with the control plasmid did not. This result indicated that DHADs from these bacteria were actively expressed in S. cerevisiae.

TABLE 10
Bacterial DHADs tested and Expression vectors

| | SEQ ID NO. | |
|---|---|---|
| | OF DHAD | |
| Organism Source | nucleic acid | Vector |
| of DHAD | sequence | designation |
| Nitrosomonas europaea ATCC | 174 | pRS423 FBA ilvD |
| 19718 | | (europ) |
| Synechocystis sp PCC 6803 | 176 | pRS423 FBA ilvD |
| | | (Synech) |
| Streptococcus thermophilus | 180 | pRS423 FBA ilvD |
| LMG 18311 | | (thermo) |
| Ralstonia eutropha H16 | | pRS423 FBA ilvD |
| (ATCC 17699) | | (H16) |
| Lactococcus lactis | 186 | pRS423 FBA ilvD |
| | | (L. lactis) |

TABLE 9

| | |
|---|---|
| HMMER2.0 [2.2 g] | Program name and version |
| NAME dhad_for_hmm | Name of the input sequence alignment file |
| LENG 564 | Length of the alignment: include indels |
| ALPH Amino | Type of residues |
| MAP yes | Map of the match states to the columns of the alignment |
| COM/app/public/hmmer/current/bin/hmmbuild -F dhad-exp_hmm dhad_for_hmm.aln | Commands used to generate the file: this one means that hmmbuild (default patrameters) was applied to |
| | the alignment file |
| COM/app/public/hmmer/current/bin/hmmcalibrate dhad-exp_hmm | Commands used to generate the file: this one means that hmmcalibrate (default parametrs) was applied to |
| | the hmm profile |
| NSEQ 8 | Number of sequences in the alignment file |
| DATE Tue Jun. 3 10:48:24 2008 | When was the file generated |
| XT −8455 −4 −1000 −1000 −8455 −4 −8455 −4 | |
| NULT −4 −8455 | The transition probability distribution for the null model (single G state). |
| | The symbol emission probability distribution for the null model (G state); consists of K (e.g. 4 or 20) |
| NULE 595 −1558 85 338 −294 453 −1158 197 249 902 −1085 −142 −21 −313 45 | integers. The null probability used to convert these back to model probabilities is 1/K. |
| 531 201 384 −199 | |
| | The extreme value distribution parameters μ and lambda respectively; both floating point values. |
| EVD −499.650970 0.086142 | Lambda is positive and nonzero. These values are set when the model is calibrated with hmmcalibrate. |

| | | | | | | | | | | | | | | | | | | | | | Position in |
|---|---|---|---|---|---|---|---|---|---|---|---|---|---|---|---|---|---|---|---|---|---|
| HMM | A | C | D | E | F | G | H | I | K | L | M | N | P | Q | R | S | T | V | W | Y | alignment |
| | m−>m | m−>i | m−>d | i−>m | i−>i | d−>m | d−>d | b−>m | m−>e | | | | | | | | | | | | |
| | −538 | * | −1684 | | | | | | | | | | | | | | | | | | |
| 1(M) | −233 | −1296 | 99 | 1223 | −1477 | −1132 | 89 | −1122 | 420 | −1248 | 1757 | 1553 | −1296 | 464 | −24 | −190 | −188 | −838 | −1578 | −985 | 6 |
| — | −149 | −500 | 233 | 43 | −381 | 399 | 106 | −626 | 210 | −466 | −720 | 275 | 394 | 45 | 96 | 359 | 117 | −369 | −294 | −249 | |
| — | −29 | −6203 | −7245 | −894 | −1115 | −701 | −1378 | −538 | * | | | | | | | | | | | | |
| 2(E) | −220 | −1288 | 232 | 1356 | −1807 | 1016 | −70 | −1474 | 190 | −1584 | −775 | 132 | −1298 | 300 | −282 | −183 | 1140 | −1092 | −1872 | −1262 | 7 |
| — | −149 | −500 | 233 | 43 | −381 | 399 | 106 | −626 | 210 | −466 | −720 | 275 | 394 | 45 | 96 | 359 | 117 | −369 | −294 | −249 | |
| — | −29 | −6203 | −7245 | −894 | −1115 | −701 | −1378 | * | * | | | | | | | | | | | | |
| 3(K) | −448 | −1932 | 1558 | 658 | −2220 | −1048 | 40 | −1983 | 1569 | −1938 | −1091 | 1558 | −1319 | 450 | −193 | −278 | −419 | −1552 | −2121 | −1397 | 8 |
| — | −149 | −500 | 233 | 43 | −381 | 399 | 106 | −626 | 210 | −466 | −720 | 275 | 394 | 45 | 96 | 359 | 117 | −369 | −294 | −249 | |
| — | −29 | −6203 | −7245 | −894 | −1115 | −701 | −1378 | * | * | | | | | | | | | | | | |
| 4(V) | −404 | −498 | −1497 | −939 | −588 | −1810 | −640 | 1591 | 914 | −127 | 335 | −962 | −1866 | −562 | −767 | −868 | −357 | 1720 | −1169 | −763 | 9 |
| — | −149 | −500 | 233 | 43 | −381 | 399 | 106 | −626 | 210 | −466 | −720 | 275 | 394 | 45 | 96 | 359 | 117 | −369 | −294 | −249 | |
| — | −29 | −6203 | −7245 | −894 | −1115 | −701 | −1378 | * | * | | | | | | | | | | | | |
| 5(E) | −265 | −1340 | −52 | 1376 | −1572 | −1189 | 113 | −1125 | 1345 | −1287 | −496 | 99 | −1321 | 505 | 198 | −218 | −205 | 597 | −1598 | −1032 | 10 |
| — | −149 | −500 | 233 | 43 | −381 | 399 | 106 | −626 | 210 | −466 | −720 | 275 | 394 | 45 | 96 | 359 | 117 | −369 | −294 | −249 | |
| — | −29 | −6203 | −7245 | −894 | −1115 | −701 | −1378 | * | * | | | | | | | | | | | | |
| 6(S) | 256 | −397 | −1014 | −830 | −1841 | −646 | −862 | −1443 | −767 | −1740 | −963 | −568 | −1249 | −651 | −1007 | 2267 | 1586 | −862 | −2080 | −1672 | 11 |
| — | −149 | −500 | 233 | 43 | −381 | 399 | 106 | −626 | 210 | −466 | −720 | 275 | 394 | 45 | 96 | 359 | 117 | −369 | −294 | −249 | |
| — | −29 | −6203 | −7245 | −894 | −1115 | −701 | −1378 | * | * | | | | | | | | | | | | |
| 7(M) | −990 | −889 | −2630 | 157 | −513 | −2514 | −1346 | 1309 | −1767 | 820 | 3683 | −1898 | −2491 | −1496 | −1799 | −1589 | −925 | 150 | −1336 | −1041 | 12 |
| — | −149 | −500 | 233 | 43 | −381 | 399 | 106 | −626 | 210 | −466 | −720 | 275 | 394 | 45 | 96 | 359 | 117 | −369 | −294 | −249 | |
| — | −16 | −7108 | −8150 | −894 | −1115 | −701 | −1378 | * | * | | | | | | | | | | | | |
| 8(E) | 588 | −1875 | −194 | 1536 | −2188 | −1373 | −59 | −1931 | 957 | −1890 | −977 | 904 | 292 | 393 | −162 | 483 | −372 | −1495 | −2070 | −1391 | 13 |
| — | −149 | −500 | 233 | 43 | −381 | 399 | 106 | −626 | 210 | −466 | −720 | 275 | 394 | 45 | 96 | 359 | 117 | −369 | −294 | −249 | |
| — | −16 | −7108 | −8150 | −894 | −1115 | −701 | −1378 | * | * | | | | | | | | | | | | |
| 9(N) | −514 | −1116 | 1207 | −315 | 447 | −1650 | −304 | −778 | −224 | 825 | −277 | 1457 | −1738 | −123 | −618 | −627 | −454 | −603 | −1186 | 763 | 14 |
| — | −149 | −500 | 233 | 43 | −381 | 399 | 106 | −626 | 210 | −466 | −720 | 275 | 394 | 45 | 96 | 359 | 117 | −369 | −294 | −249 | |
| — | −16 | −7108 | −8150 | −894 | −1115 | −701 | −1378 | * | * | | | | | | | | | | | | |
| 10(N) | −815 | −1190 | −1360 | −922 | −904 | −1967 | −797 | −442 | −670 | 381 | 1700 | 3009 | −2099 | −654 | −934 | −1051 | −791 | −445 | −1490 | −979 | 15 |
| — | −149 | −500 | 233 | 43 | −381 | 399 | 106 | −626 | 210 | −466 | −720 | 275 | 394 | 45 | 96 | 359 | 117 | −369 | −294 | −249 | |
| — | −16 | −7108 | −8150 | −894 | −1115 | −701 | −1378 | * | * | | | | | | | | | | | | |
| 11(K) | −1530 | −2498 | −1722 | −855 | −3141 | −2246 | −428 | −2627 | 2828 | −2404 | −1656 | −927 | 662 | −2 | 2047 | −1421 | −1337 | −2324 | −2357 | −2081 | 16 |
| — | −149 | −500 | 233 | 43 | −381 | 399 | 106 | −626 | 210 | −466 | −720 | 275 | 394 | 45 | 96 | 359 | 117 | −369 | −294 | −249 | |
| — | −16 | −7108 | −8150 | −894 | −1115 | −701 | −1378 | * | * | | | | | | | | | | | | |
| 12(Y) | −872 | −1887 | −861 | −290 | −1369 | −1801 | 1662 | −1797 | 325 | −1793 | −1031 | 893 | −1876 | 56 | 2219 | −812 | −780 | −1514 | −1565 | 2287 | 17 |
| — | −149 | −500 | 233 | 43 | −381 | 399 | 106 | −626 | 210 | −466 | −720 | 275 | 394 | 45 | 96 | 359 | 117 | −369 | −294 | −249 | |
| — | −16 | −7108 | −8150 | −894 | −1115 | −701 | −1378 | * | * | | | | | | | | | | | | |
| 13(S) | −830 | −1586 | −1471 | −1099 | −2717 | −1642 | −1010 | −2479 | −266 | −2518 | −1746 | −1065 | −2069 | −676 | 1822 | 2748 | −1000 | −1950 | −2597 | −2189 | 18 |
| — | −149 | −500 | 233 | 43 | −381 | 399 | 106 | −626 | 210 | −466 | −720 | 275 | 394 | 45 | 96 | 359 | 117 | −369 | −294 | −249 | |
| — | −16 | −7108 | −8150 | −894 | −1115 | −701 | −1378 | * | * | | | | | | | | | | | | |
| 14(Q) | −851 | −2131 | −775 | −153 | −2554 | −1735 | −211 | −2205 | 1908 | −2094 | −1244 | −386 | −1802 | 2254 | 974 | 1001 | −747 | −1819 | −2181 | −1667 | 19 |
| — | −149 | −500 | 233 | 43 | −381 | 399 | 106 | −626 | 210 | −466 | −720 | 275 | 394 | 45 | 96 | 359 | 117 | −369 | −294 | −249 | |
| — | −16 | −7108 | −8150 | −894 | −1115 | −701 | −1378 | * | * | | | | | | | | | | | | |
| 15(T) | −405 | −1258 | −618 | −100 | −1490 | −1466 | 1158 | −1121 | 1 | −1299 | −514 | 578 | −1607 | 65 | −433 | 960 | 1849 | 343 | −1677 | −1143 | 20 |
| — | −149 | −500 | 233 | 43 | −381 | 399 | 106 | −626 | 210 | −466 | −720 | 275 | 394 | 45 | 96 | 359 | 117 | −369 | −294 | −249 | |
| — | −16 | −7108 | −8150 | −894 | −1115 | −701 | −1378 | * | * | | | | | | | | | | | | |
| 16(I) | −1772 | −1325 | −4307 | −3877 | −1405 | −3993 | −3383 | 2935 | −3705 | 820 | −217 | −3632 | −3761 | −3400 | −3682 | −3260 | −1742 | 2033 | −2838 | −2525 | 21 |
| — | −149 | −500 | 233 | 43 | −381 | 399 | 106 | −626 | 210 | −466 | −720 | 275 | 394 | 45 | 96 | 359 | 117 | −369 | −294 | −249 | |
| — | −16 | −7108 | −8150 | −894 | −1115 | −701 | −1378 | * | * | | | | | | | | | | | | |
| 17(T) | −1018 | −1329 | −2004 | −1771 | −409 | −1993 | −1000 | −1256 | −1512 | −1464 | −966 | −1543 | −2367 | −1428 | −1638 | −1257 | 3050 | −1090 | −1012 | 2448 | 22 |
| — | −149 | −500 | 233 | 43 | −381 | 399 | 106 | −626 | 210 | −466 | −720 | 275 | 394 | 45 | 96 | 359 | 117 | −369 | −294 | −249 | |
| — | −16 | −7108 | −8150 | −894 | −1115 | −701 | −1378 | * | * | | | | | | | | | | | | |
| 18(Q) | −1509 | −3056 | 1970 | 44 | −3310 | −1666 | −896 | −3242 | −877 | −3158 | −2439 | −322 | −2123 | 3562 | −1493 | −1259 | −1550 | −2779 | −3260 | −2446 | 23 |
| — | −149 | −500 | 233 | 43 | −381 | 399 | 106 | −626 | 210 | −466 | −720 | 275 | 394 | 45 | 96 | 359 | 117 | −369 | −294 | −249 | |
| — | −16 | −7108 | −8150 | −894 | −1115 | −701 | −1378 | * | * | | | | | | | | | | | | |
| 19(D) | −1006 | −2199 | 2178 | −88 | −3159 | 1997 | −936 | −2974 | −948 | −2977 | −2174 | −382 | −1960 | −589 | −1571 | 1295 | −1157 | −2369 | −3178 | −2430 | 24 |
| — | −149 | −500 | 233 | 43 | −381 | 399 | 106 | −626 | 210 | −466 | −720 | 275 | 394 | 45 | 96 | 359 | 117 | −369 | −294 | −249 | |
| — | −16 | −7108 | −8150 | −894 | −1115 | −701 | −1378 | * | * | | | | | | | | | | | | |
| 20(M) | 445 | −796 | −1082 | −521 | −841 | −1643 | −412 | −403 | −370 | −692 | 2213 | −646 | 536 | 1166 | −698 | −630 | 660 | 831 | −1204 | −767 | 25 |
| — | −149 | −500 | 233 | 43 | −381 | 399 | 106 | −626 | 210 | −466 | −720 | 275 | 394 | 45 | 96 | 359 | 117 | −369 | −294 | −249 | |
| — | −16 | −7108 | −8150 | −894 | −1115 | −701 | −1378 | * | * | | | | | | | | | | | | |
| 21(Q) | 741 | −990 | −1025 | −507 | −1249 | −1551 | −519 | −720 | −357 | −1062 | −345 | −635 | −1739 | 1770 | −713 | −589 | 1576 | 1129 | −1559 | −1097 | 26 |
| — | −149 | −500 | 233 | 43 | −381 | 399 | 106 | −626 | 210 | −466 | −720 | 275 | 394 | 45 | 96 | 359 | 117 | −369 | −294 | −249 | |
| — | −16 | −7108 | −8150 | −894 | −1115 | −701 | −1378 | * | * | | | | | | | | | | | | |
| 22(R) | −1753 | −2648 | −2072 | −1047 | −3365 | −2405 | −452 | −2782 | 1989 | −2495 | −1773 | −1062 | −2379 | 2402 | 2643 | −1629 | −1506 | −2504 | −2397 | −2190 | 27 |
| — | −149 | −500 | 233 | 43 | −381 | 399 | 106 | −626 | 210 | −466 | −720 | 275 | 394 | 45 | 96 | 359 | 117 | −369 | −294 | −249 | |
| — | −16 | −7108 | −8150 | −894 | −1115 | −701 | −1378 | * | * | | | | | | | | | | | | |
| 23(S) | −330 | −1010 | −1820 | −1628 | −2778 | −1229 | −1652 | −2481 | −1592 | −2691 | −1841 | −1273 | 2130 | −1426 | −1834 | −2449 | 1034 | −1716 | −2961 | −2594 | 28 |
| — | −149 | −500 | 233 | 43 | −381 | 399 | 106 | −626 | 210 | −466 | −720 | 275 | 394 | 45 | 96 | 359 | 117 | −369 | −294 | −249 | |
| — | −16 | −7108 | −8150 | −894 | −1115 | −701 | −1378 | * | * | | | | | | | | | | | | |
| 24(P) | 1882 | −1119 | −2231 | −2302 | −3062 | −1360 | −2209 | −2710 | −2339 | −3013 | −2243 | −1676 | 3304 | −2117 | −2409 | −742 | −918 | −1916 | −3263 | −3022 | 29 |
| — | −149 | −500 | 233 | 43 | −381 | 399 | 106 | −626 | 210 | −466 | −720 | 275 | 394 | 45 | 96 | 359 | 117 | −369 | −294 | −249 | |
| — | −16 | −7108 | −8150 | −894 | −1115 | −701 | −1378 | * | * | | | | | | | | | | | | |
| 25(N) | 969 | −1230 | −1066 | −915 | −2593 | −1313 | −1196 | −2242 | −1033 | −2447 | −1626 | 3197 | −1850 | −898 | −1392 | −582 | 1155 | −1644 | −2736 | −2256 | 30 |
| — | −149 | −500 | 233 | 43 | −381 | 399 | 106 | −626 | 210 | −466 | −720 | 275 | 394 | 45 | 96 | 359 | 117 | −369 | −294 | −249 | |
| — | −16 | −7108 | −8150 | −894 | −1115 | −701 | −1378 | * | * | | | | | | | | | | | | |
| 26(R) | −1847 | −2640 | −2014 | −1161 | −3282 | −2428 | −579 | −2818 | 687 | −2553 | −1869 | −1165 | −2462 | 2447 | 3181 | −1746 | −1630 | −2555 | −2447 | −2228 | 31 |
| — | −149 | −500 | 233 | 43 | −381 | 399 | 106 | −626 | 210 | −466 | −720 | 275 | 394 | 45 | 96 | 359 | 117 | −369 | −294 | −249 | |
| — | −16 | −7108 | −8150 | −894 | −1115 | −701 | −1378 | * | * | | | | | | | | | | | | |
| 27(A) | 3048 | −932 | −2480 | −2533 | −3075 | −1200 | −2274 | −2765 | −2501 | −3071 | −2221 | −1658 | −1948 | −2205 | −2512 | 1225 | −739 | −1842 | −3322 | −3078 | 32 |
| — | −149 | −500 | 233 | 43 | −381 | 399 | 106 | −626 | 210 | −466 | −720 | 275 | 394 | 45 | 96 | 359 | 117 | −369 | −294 | −249 | |
| — | −16 | −7108 | −8150 | −894 | −1115 | −701 | −1378 | * | * | | | | | | | | | | | | |
| 28(M) | −2406 | −2296 | −3638 | −3594 | −1525 | −3105 | −2824 | −1047 | −3121 | −596 | 5043 | −3293 | −3425 | −3046 | −2996 | −2911 | −2552 | −1398 | −2513 | −2207 | 33 |
| — | −149 | −500 | 233 | 43 | −381 | 399 | 106 | −626 | 210 | −466 | −720 | 275 | 394 | 45 | 96 | 359 | 117 | −369 | −294 | −249 | |
| — | −16 | −7108 | −8150 | −894 | −1115 | −701 | −1378 | * | * | | | | | | | | | | | | |
| 29(Y) | −1674 | −1506 | −2863 | −2464 | 596 | −2872 | 2251 | −972 | −2024 | 2197 | −552 | −1986 | −2876 | −1739 | −1988 | −1987 | −1601 | −1002 | −95 | 2332 | 34 |
| — | −149 | −500 | 233 | 43 | −381 | 399 | 106 | −626 | 210 | −466 | −720 | 275 | 394 | 45 | 96 | 359 | 117 | −369 | −294 | −249 | |
| — | −16 | −7108 | −8150 | −894 | −1115 | −701 | −1378 | * | * | | | | | | | | | | | | |
| 30(Y) | −2013 | −2305 | −2428 | −1781 | −328 | −2709 | −654 | −2240 | −258 | −2064 | −1626 | −1631 | −2788 | −899 | 2789 | −2017 | −1896 | −2130 | −857 | 3434 | 35 |
| — | −149 | −500 | 233 | 43 | −381 | 399 | 106 | −626 | 210 | −466 | −720 | 275 | 394 | 45 | 96 | 359 | 117 | −369 | −294 | −249 | |
| — | −16 | −7108 | −8150 | −894 | −1115 | −701 | −1378 | * | * | | | | | | | | | | | | |
| 31(A) | 2822 | −1031 | −2418 | −2539 | −3226 | 1898 | −2364 | −2941 | −2626 | −3229 | −2379 | −1722 | −2026 | −2302 | −2634 | −654 | −848 | −1983 | −3415 | −3226 | 36 |
| — | −149 | −500 | 233 | 43 | −381 | 399 | 106 | −626 | 210 | −466 | −720 | 275 | 394 | 45 | 96 | 359 | 117 | −369 | −294 | −249 | |
| — | −16 | −7108 | −8150 | −894 | −1115 | −701 | −1378 | * | * | | | | | | | | | | | | |
| 32(I) | −1247 | −941 | −3569 | −3039 | −1082 | −3101 | −2185 | 2227 | −2763 | 766 | −76 | −2700 | −3050 | −2469 | −2697 | −2253 | 1322 | 1974 | −1988 | −1633 | 37 |
| — | −149 | −500 | 233 | 43 | −381 | 399 | 106 | −626 | 210 | −466 | −720 | 275 | 394 | 45 | 96 | 359 | 117 | −369 | −294 | −249 | |
| — | −16 | −7108 | −8150 | −894 | −1115 | −701 | −1378 | * | * | | | | | | | | | | | | |
| 33(G) | −2594 | −2690 | −3304 | −3623 | −4328 | 3747 | −3462 | −4761 | −3953 | −4671 | −4212 | −3320 | −3352 | −3748 | −3779 | −2839 | −2981 | −4004 | −3668 | −4222 | 38 |
| — | −149 | −500 | 233 | 43 | −381 | 399 | 106 | −626 | 210 | −466 | −720 | 275 | 394 | 45 | 96 | 359 | 117 | −369 | −294 | −249 | |
| — | −16 | −7108 | −8150 | −894 | −1115 | −701 | −1378 | * | * | | | | | | | | | | | | |
| 34(F) | −1511 | −1236 | −3511 | −3017 | 2747 | −2982 | −1069 | −260 | −2651 | 992 | 2737 | −2407 | −2904 | −2088 | −2418 | −2099 | −1434 | −489 | −537 | 2056 | 39 |
| — | −149 | −500 | 233 | 43 | −381 | 399 | 106 | −626 | 210 | −466 | −720 | 275 | 394 | 45 | 96 | 359 | 117 | −369 | −294 | −249 | |
| — | −16 | −7108 | −8150 | −894 | −1115 | −701 | −1378 | * | * | | | | | | | | | | | | |
| 35(Q) | −576 | −1869 | −401 | 92 | −2232 | 831 | −173 | −1930 | 1505 | −1913 | −1042 | −186 | −1620 | 1653 | −51 | −482 | 1346 | −1534 | −2098 | −1490 | 40 |
| — | −149 | −500 | 233 | 43 | −381 | 399 | 106 | −626 | 210 | −466 | −720 | 275 | 394 | 45 | 96 | 359 | 117 | −369 | −294 | −249 | |
| — | −16 | −7108 | −8150 | −894 | −1115 | −701 | −1378 | * | * | | | | | | | | | | | | |
| 36(D) | −1352 | −3066 | 3028 | 1349 | −3303 | −1566 | −724 | −3141 | 1155 | −3043 | −2267 | −165 | −1991 | −354 | −1350 | −1086 | −1368 | −2659 | −3221 | −2356 | 41 |
| — | −149 | −500 | 233 | 43 | −381 | 399 | 106 | −626 | 210 | −466 | −720 | 275 | 394 | 45 | 96 | 359 | 117 | −369 | −294 | −249 | |
| — | −16 | −7108 | −8150 | −894 | −1115 | −701 | −1378 | * | * | | | | | | | | | | | | |
| 37(E) | −1507 | −3288 | 2042 | 2762 | −3520 | 515 | −853 | −3401 | −981 | −3296 | −2566 | −182 | −2064 | −503 | −1753 | −1209 | −1553 | −2895 | −3486 | −2547 | 42 |
| — | −149 | −500 | 233 | 43 | −381 | 399 | 106 | −626 | 210 | −466 | −720 | 275 | 394 | 45 | 96 | 359 | 117 | −369 | −294 | −249 | |
| — | −16 | −7108 | −8150 | −894 | −1115 | −701 | −1378 | * | * | | | | | | | | | | | | |
| 38(D) | −1445 | −2778 | 3529 | −53 | −3524 | −1590 | −1129 | −3476 | −1367 | −3459 | −2774 | −396 | −2156 | −825 | −2122 | 554 | −1609 | −2880 | −3582 | −2717 | 43 |
| — | −149 | −500 | 233 | 43 | −381 | 399 | 106 | −626 | 210 | −466 | −720 | 275 | 394 | 45 | 96 | 359 | 117 | −369 | −294 | −249 | |
| — | −16 | −7108 | −8150 | −894 | −1115 | −701 | −1378 | * | * | | | | | | | | | | | | |
| 39(F) | −2658 | −2176 | −4213 | −4000 | 3815 | −3933 | −1352 | −531 | −3638 | 1121 | −19 | −3184 | −3709 | −2820 | −3296 | −3219 | −2579 | −1037 | −601 | 403 | 44 |
| — | −149 | −500 | 233 | 43 | −381 | 399 | 106 | −626 | 210 | −466 | −720 | 275 | 394 | 45 | 96 | 359 | 117 | −369 | −294 | −249 | |
| — | −16 | −7108 | −8150 | −894 | −1115 | −701 | −1378 | * | * | | | | | | | | | | | | |
| 40(D) | −684 | −2193 | 1738 | 1460 | −2494 | −1437 | −249 | −2257 | 1694 | −2199 | −1308 | −62 | −1637 | 185 | −450 | −531 | 633 | −1808 | −2374 | −1657 | 45 |
| — | −149 | −500 | 233 | 43 | −381 | 399 | 106 | −626 | 210 | −466 | −720 | 275 | 394 | 45 | 96 | 359 | 117 | −369 | −294 | −249 | |
| — | −16 | −7108 | −8150 | −894 | −1115 | −701 | −1378 | * | * | | | | | | | | | | | | |
| 41(K) | −2620 | −2961 | −2461 | −2046 | −3743 | −2791 | −1570 | −3603 | 3784 | −3387 | −2839 | −2048 | −3039 | −1260 | −465 | −2604 | −2536 | −3331 | −3001 | −2988 | 46 |
| — | −149 | −500 | 233 | 43 | −381 | 399 | 106 | −626 | 210 | −466 | −720 | 275 | 394 | 45 | 96 | 359 | 117 | −369 | −294 | −249 | |
| — | −16 | −7108 | −8150 | −894 | −1115 | −701 | −1378 | * | * | | | | | | | | | | | | |
| 42(P) | 1882 | −1119 | −2231 | −2302 | −3062 | −1360 | −2209 | −2710 | −2339 | −3013 | −2243 | −1676 | 3304 | −2117 | −2409 | −742 | −918 | −1916 | −3263 | −3022 | 47 |
| — | −149 | −500 | 233 | 43 | −381 | 399 | 106 | −626 | 210 | −466 | −720 | 275 | 394 | 45 | 96 | 359 | 117 | −369 | −294 | −249 | |
| — | −16 | −7108 | −8150 | −894 | −1115 | −701 | −1378 | * | * | | | | | | | | | | | | |
| 43(I) | −1006 | −992 | −2347 | −1784 | −650 | −2452 | −1256 | 2372 | −1386 | 77 | 2213 | −1720 | −2455 | 2030 | −1490 | −1528 | −946 | 106 | −1441 | −1111 | 48 |
| — | −149 | −500 | 233 | 43 | −381 | 399 | 106 | −626 | 210 | −466 | −720 | 275 | 394 | 45 | 96 | 359 | 117 | −369 | −294 | −249 | |
| — | −16 | −7108 | −8150 | −894 | −1115 | −701 | −1378 | * | * | | | | | | | | | | | | |
| 44(V) | −1771 | −1603 | −3750 | −3689 | −2037 | −3050 | −3231 | 403 | −3479 | −1154 | −1076 | −3246 | −3399 | −3383 | −3437 | −2628 | −1917 | 3536 | −3074 | −2677 | 49 |
| — | −149 | −500 | 233 | 43 | −381 | 399 | 106 | −626 | 210 | −466 | −720 | 275 | 394 | 45 | 96 | 359 | 117 | −369 | −294 | −249 | |
| — | −16 | −7108 | −8150 | −894 | −1115 | −701 | −1378 | * | * | | | | | | | | | | | | |
| 45(G) | −2594 | −2690 | −3304 | −3623 | −4328 | 3747 | −3462 | −4761 | −3953 | −4671 | −4212 | −3320 | −3352 | −3748 | −3779 | −2839 | −2981 | −4004 | −3668 | −4222 | 50 |
| — | −149 | −500 | 233 | 43 | −381 | 399 | 106 | −626 | 210 | −466 | −720 | 275 | 394 | 45 | 96 | 359 | 117 | −369 | −294 | −249 | |
| — | −16 | −7108 | −8150 | −894 | −1115 | −701 | −1378 | * | * | | | | | | | | | | | | |
| 46(I) | −1759 | −1303 | −4330 | −3968 | −1751 | −4051 | −3743 | 3027 | −3837 | −597 | −528 | −3729 | −3875 | −3688 | −3910 | −3369 | −1751 | 2438 | −3259 | −2819 | 51 |
| — | −149 | −500 | 233 | 43 | −381 | 399 | 106 | −626 | 210 | −466 | −720 | 275 | 394 | 45 | 96 | 359 | 117 | −369 | −294 | −249 | |
| — | −16 | −7108 | −8150 | −894 | −1115 | −701 | −1378 | * | * | | | | | | | | | | | | |
| 47(V) | 1736 | −1012 | −3546 | −3078 | −1377 | −3073 | −2434 | 2052 | −2843 | −608 | −331 | −2754 | −3122 | −2619 | −2855 | −2270 | −1277 | 2193 | −2333 | −1941 | 52 |
| — | −149 | −500 | 233 | 43 | −381 | 399 | 106 | −626 | 210 | −466 | −720 | 275 | 394 | 45 | 96 | 359 | 117 | −369 | −294 | −249 | |
| — | −16 | −7108 | −8150 | −894 | −1115 | −701 | −1378 | * | * | | | | | | | | | | | | |
| 48(N) | −686 | −1511 | −702 | −806 | −2927 | −1386 | −1339 | −2841 | −1264 | −2950 | −2137 | 2702 | −1979 | −1062 | −1648 | 2444 | −971 | −2105 | −3054 | −2475 | 53 |
| — | −149 | −500 | 233 | 43 | −381 | 399 | 106 | −626 | 210 | −466 | −720 | 275 | 394 | 45 | 96 | 359 | 117 | −369 | −294 | −249 | |
| — | −16 | −7108 | −8150 | −894 | −1115 | −701 | −1378 | * | * | | | | | | | | | | | | |
| 49(M) | −411 | −857 | −1800 | −1434 | −1528 | 1914 | −1202 | −1029 | −1247 | −1347 | 2989 | −1217 | −1912 | −1119 | −1444 | −676 | 1550 | −767 | −1922 | −1539 | 54 |
| — | −149 | −500 | 233 | 43 | −381 | 399 | 106 | −626 | 210 | −466 | −720 | 275 | 394 | 45 | 96 | 359 | 117 | −369 | −294 | −249 | |
| — | −16 | −7108 | −8150 | −894 | −1115 | −701 | −1378 | * | * | | | | | | | | | | | | |
| 50(W) | −782 | −1258 | 793 | −683 | 1193 | 346 | 2051 | −932 | −556 | −1092 | −441 | −798 | −1993 | −426 | −909 | −904 | −720 | −779 | 3163 | 1546 | 55 |
| — | −149 | −500 | 233 | 43 | −381 | 399 | 106 | −626 | 210 | −466 | −720 | 275 | 394 | 45 | 96 | 359 | 117 | −369 | −294 | −249 | |
| — | −16 | −7108 | −8150 | −894 | −1115 | −701 | −1378 | * | * | | | | | | | | | | | | |
| 51(W) | 1009 | −798 | −1470 | −935 | −463 | −1773 | −545 | −460 | −751 | −736 | −66 | −943 | −1904 | −606 | −1002 | 1604 | −507 | −322 | 2535 | 1521 | 56 |
| — | −149 | −500 | 233 | 43 | −381 | 399 | 106 | −626 | 210 | −466 | −720 | 275 | 394 | 45 | 96 | 359 | 117 | −369 | −294 | −249 | |
| — | −16 | −7108 | −8150 | −894 | −1115 | −701 | −1378 | * | * | | | | | | | | | | | | |
| 52(D) | −1137 | −2711 | 2125 | 1647 | −2995 | −1523 | −617 | −2786 | −528 | −2743 | −1933 | −150 | −1897 | −234 | −1165 | −924 | 2117 | −2331 | −2948 | −2141 | 57 |
| — | −149 | −500 | 233 | 43 | −381 | 399 | 106 | −626 | 210 | −466 | −720 | 275 | 394 | 45 | 96 | 359 | 117 | −369 | −294 | −249 | |
| — | −16 | −7108 | −8150 | −894 | −1115 | −701 | −1378 | * | * | | | | | | | | | | | | |
| 53(I) | −599 | −1102 | −1031 | −829 | −1522 | 1429 | −927 | 2119 | −880 | −1369 | −699 | 1692 | −1938 | −759 | −1188 | −799 | −698 | −689 | −1887 | −1419 | 58 |
| — | −149 | −500 | 233 | 43 | −381 | 399 | 106 | −626 | 210 | −466 | −720 | 275 | 394 | 45 | 96 | 359 | 117 | −369 | −294 | −249 | |
| — | −16 | −7108 | −8150 | −894 | −1115 | −701 | −1378 | * | * | | | | | | | | | | | | |
| 54(T) | −666 | −1412 | −954 | −984 | −2702 | −1428 | −1357 | −2418 | −1208 | −2650 | −1886 | 2293 | −2000 | −1101 | −1519 | −787 | 2967 | −1835 | −2866 | −2360 | 59 |
| — | −149 | −500 | 233 | 43 | −381 | 399 | 106 | −626 | 210 | −466 | −720 | 275 | 394 | 45 | 96 | 359 | 117 | −369 | −294 | −249 | |
| — | −16 | −7108 | −8150 | −894 | −1115 | −701 | −1378 | * | * | | | | | | | | | | | | |
| 55(P) | −632 | −1230 | −2074 | −2144 | −2996 | −1453 | −2116 | −2631 | −2128 | −2928 | −2213 | −1658 | 3610 | −2006 | −2221 | −852 | 1302 | −1931 | −3185 | −2917 | 60 |
| — | −149 | −500 | 233 | 43 | −381 | 399 | 106 | −626 | 210 | −466 | −720 | 275 | 394 | 45 | 96 | 359 | 117 | −369 | −294 | −249 | |
| — | −16 | −7108 | −8150 | −894 | −1115 | −701 | −1378 | * | * | | | | | | | | | | | | |
| 56(C) | −2476 | 3735 | −4102 | −4358 | −3712 | −2763 | −3545 | −3518 | −4167 | −3859 | −3569 | −3631 | −3363 | −4030 | −3832 | −2793 | −2860 | −3158 | −3464 | −3718 | 61 |
| — | −149 | −500 | 233 | 43 | −381 | 399 | 106 | −626 | 210 | −466 | −720 | 275 | 394 | 45 | 96 | 359 | 117 | −369 | −294 | −249 | |
| — | −16 | −7108 | −8150 | −894 | −1115 | −701 | −1378 | * | * | | | | | | | | | | | | |
| 57(N) | −2171 | −2655 | −1458 | −1748 | −3334 | −2364 | −2267 | −3943 | −2365 | −3936 | −3437 | 4205 | −2932 | −2205 | −2608 | −2224 | −2439 | −3392 | −3253 | −2909 | 62 |
| — | −149 | −500 | 233 | 43 | −381 | 399 | 106 | −626 | 210 | −466 | −720 | 275 | 394 | 45 | 96 | 359 | 117 | −369 | −294 | −249 | |
| — | −16 | −7108 | −8150 | −894 | −1115 | −701 | −1378 | * | * | | | | | | | | | | | | |
| 58(M) | 672 | −918 | −3119 | −2578 | −742 | −2668 | −1734 | 1807 | −2263 | 16 | 3713 | −2271 | −2704 | −1960 | −2216 | −1806 | −1058 | 493 | −1612 | −1306 | 63 |
| — | −149 | −500 | 233 | 43 | −381 | 399 | 106 | −626 | 210 | −466 | −720 | 275 | 394 | 45 | 96 | 359 | 117 | −369 | −294 | −249 | |
| — | −16 | −7108 | −8150 | −894 | −1115 | −701 | −1378 | * | * | | | | | | | | | | | | |
| 59(H) | −1525 | −2164 | −1235 | −1346 | −2509 | 2296 | 4235 | −3172 | −1516 | −3178 | −2523 | −1448 | −2541 | −1520 | −1760 | −1591 | −1741 | −2656 | −2681 | −2065 | 64 |
| — | −149 | −500 | 233 | 43 | −381 | 399 | 106 | −626 | 210 | −466 | −720 | 275 | 394 | 45 | 96 | 359 | 117 | −369 | −294 | −249 | |
| — | −16 | −7108 | −8150 | −894 | −1115 | −701 | −1378 | * | * | | | | | | | | | | | | |
| 60(L) | −2478 | −2009 | −4717 | −4196 | −568 | −4424 | −3262 | 1334 | −3887 | 2824 | 604 | −4085 | −3872 | −3088 | −3590 | −3717 | −2380 | −199 | −2217 | −2207 | 65 |
| — | −149 | −500 | 233 | 43 | −381 | 399 | 106 | −626 | 210 | −466 | −720 | 275 | 394 | 45 | 96 | 359 | 117 | −369 | −294 | −249 | |
| — | −16 | −7108 | −8150 | −894 | −1115 | −701 | −1378 | * | * | | | | | | | | | | | | |
| 61(H) | −682 | −2191 | 1015 | 275 | −2485 | 396 | 2379 | −2251 | 62 | −2197 | −1307 | 1826 | −1636 | 1527 | −480 | −529 | −641 | −1803 | −2375 | −1654 | 66 |
| — | −149 | −500 | 233 | 43 | −381 | 399 | 106 | −626 | 210 | −466 | −720 | 275 | 394 | 45 | 96 | 359 | 117 | −369 | −294 | −249 | |
| — | −16 | −7108 | −8150 | −894 | −1115 | −701 | −1378 | * | * | | | | | | | | | | | | |
| 62(D) | −575 | −1920 | 1979 | 184 | −2299 | 94 | −242 | −2029 | 114 | −2023 | −1144 | −120 | −1608 | 186 | 1063 | −469 | 1413 | −1605 | −2229 | −1561 | 67 |
| — | −149 | −500 | 233 | 43 | −381 | 399 | 106 | −626 | 210 | −466 | −720 | 275 | 394 | 45 | 96 | 359 | 117 | −369 | −294 | −249 | |
| — | −16 | −7108 | −8150 | −894 | −1115 | −701 | −1378 | * | * | | | | | | | | | | | | |
| 63(L) | −2618 | −2139 | −4597 | −4163 | 2144 | −4285 | −2334 | −83 | −3854 | 2690 | 538 | −3771 | −3806 | −2950 | −3488 | −3563 | −2505 | −751 | −1442 | −808 | 68 |
| — | −149 | −500 | 233 | 43 | −381 | 399 | 106 | −626 | 210 | −466 | −720 | 275 | 394 | 45 | 96 | 359 | 117 | −369 | −294 | −249 | |
| — | −16 | −7108 | −8150 | −894 | −1115 | −701 | −1378 | * | * | | | | | | | | | | | | |
| 64(A) | 2657 | −1033 | −2408 | −2532 | −3233 | 2193 | −2364 | −2950 | −2626 | −3237 | −2386 | −1719 | −2027 | −2301 | −2635 | −655 | −850 | −1988 | −3420 | −3231 | 69 |
| — | −149 | −500 | 233 | 43 | −381 | 399 | 106 | −626 | 210 | −466 | −720 | 275 | 394 | 45 | 96 | 359 | 117 | −369 | −294 | −249 | |
| — | −16 | −7108 | −8150 | −894 | −1115 | −701 | −1378 | * | * | | | | | | | | | | | | |
| 65(K) | −443 | −1857 | 958 | 270 | −2158 | −1393 | −66 | −1890 | 1839 | −442 | −957 | −36 | −1499 | 1204 | −132 | 616 | −382 | −1469 | −2048 | −1383 | 70 |
| — | −149 | −500 | 233 | 43 | −381 | 399 | 106 | −626 | 210 | −466 | −720 | 275 | 394 | 45 | 96 | 359 | 117 | −369 | −294 | −249 | |
| — | −16 | −7108 | −8150 | −894 | −1115 | −701 | −1378 | * | * | | | | | | | | | | | | |
| 66(C) | 605 | 1553 | 739 | −17 | −1374 | −1488 | −182 | 260 | 969 | −203 | −397 | −263 | −1573 | 159 | 691 | −426 | −331 | −761 | −1567 | −1032 | 71 |
| — | −149 | −500 | 233 | 43 | −381 | 399 | 106 | −626 | 210 | −466 | −720 | 275 | 394 | 45 | 96 | 359 | 117 | −369 | −294 | −249 | |
| — | −16 | −7108 | −8150 | −894 | −1115 | −701 | −1378 | * | * | | | | | | | | | | | | |
| 67(A) | 2327 | −956 | −3193 | −2728 | −1289 | −2677 | −2114 | 1664 | −2485 | −601 | −288 | −2403 | −2839 | −2263 | −2523 | −1871 | −1126 | 1617 | −2143 | −1765 | 72 |
| — | −149 | −500 | 233 | 43 | −381 | 399 | 106 | −626 | 210 | −466 | −720 | 275 | 394 | 45 | 96 | 359 | 117 | −369 | −294 | −249 | |
| — | −16 | −7108 | −8150 | −894 | −1115 | −701 | −1378 | * | * | | | | | | | | | | | | |
| 68(K) | −532 | −1656 | −490 | 1321 | −1891 | −1527 | −172 | −124 | 2206 | −1591 | −782 | −223 | −1619 | 237 | −106 | −482 | −464 | −98 | −1904 | −1326 | 73 |
| — | −149 | −500 | 233 | 43 | −381 | 399 | 106 | −626 | 210 | −466 | −720 | 275 | 394 | 45 | 96 | 359 | 117 | −369 | −294 | −249 | |
| — | −16 | −7108 | −8150 | −894 | −1115 | −701 | −1378 | * | * | | | | | | | | | | | | |
| 69(H) | 384 | −1854 | 936 | 889 | −2165 | −1363 | 1498 | −1909 | 1111 | −1866 | −948 | 1091 | −1464 | 421 | −131 | −284 | −342 | −69 | −2043 | −1364 | 74 |
| — | −149 | −500 | 233 | 43 | −381 | 399 | 106 | −626 | 210 | −466 | −720 | 275 | 394 | 45 | 96 | 359 | 117 | −369 | −294 | −249 | |
| — | −16 | −7108 | −8150 | −894 | −1115 | −701 | −1378 | * | * | | | | | | | | | | | | |
| 70(G) | 1823 | −932 | −2330 | −2313 | −3120 | 2511 | −2158 | −2865 | −2331 | −3098 | −2209 | −1563 | −1912 | −2032 | −2419 | 1138 | −706 | −1883 | −3328 | −3077 | 75 |
| — | −149 | −500 | 233 | 43 | −381 | 399 | 106 | −626 | 210 | −466 | −720 | 275 | 394 | 45 | 96 | 359 | 117 | −369 | −294 | −249 | |
| — | −16 | −7108 | −8150 | −894 | −1115 | −701 | −1378 | * | * | | | | | | | | | | | | |
| 71(V) | −1760 | −1333 | −4244 | −3789 | −1262 | −3902 | −3190 | 1495 | −3588 | 1270 | −96 | −3536 | −3677 | −3238 | −3534 | −3148 | −1725 | 2865 | −2654 | −2373 | 76 |
| — | −149 | −500 | 233 | 43 | −381 | 399 | 106 | −626 | 210 | −466 | −720 | 275 | 394 | 45 | 96 | 359 | 117 | −369 | −294 | −249 | |
| — | −16 | −7108 | −8150 | −894 | −1115 | −701 | −1378 | * | * | | | | | | | | | | | | |
| 72(W) | −1054 | −2172 | −1112 | −403 | −2566 | −1917 | −286 | −2196 | 2516 | −2095 | −1292 | 1183 | −1958 | 140 | 1333 | −959 | −922 | −1867 | 2591 | −1720 | 77 |
| — | −149 | −500 | 233 | 43 | −381 | 399 | 106 | −626 | 210 | −466 | −720 | 275 | 394 | 45 | 96 | 359 | 117 | −369 | −294 | −249 | |
| — | −16 | −7108 | −8150 | −894 | −1115 | −701 | −1378 | * | * | | | | | | | | | | | | |
| 73(D) | 611 | −1995 | 1525 | 937 | −2295 | −1400 | −148 | −2043 | 211 | −2006 | −1106 | −37 | −1553 | 1420 | −312 | −408 | 1235 | −1609 | −2193 | −1499 | 78 |
| — | −149 | −500 | 233 | 43 | −381 | 399 | 106 | −626 | 210 | −466 | −720 | 275 | 394 | 45 | 96 | 359 | 117 | −369 | −294 | −249 | |
| — | −16 | −7108 | −8150 | −894 | −1115 | −701 | −1378 | * | * | | | | | | | | | | | | |
| 74(A) | 2716 | −902 | −2380 | −2205 | −2799 | −1197 | −1975 | −2459 | −2081 | −2736 | −1895 | −1520 | −1895 | −1844 | −2201 | 1191 | 1299 | −1669 | −3045 | −2758 | 79 |
| — | −149 | −500 | 233 | 43 | −381 | 399 | 106 | −626 | 210 | −466 | −720 | 275 | 394 | 45 | 96 | 359 | 117 | −369 | −294 | −249 | |
| — | −16 | −7108 | −8150 | −894 | −1115 | −701 | −1378 | * | * | | | | | | | | | | | | |
| 75(G) | −1709 | −2833 | 2424 | −409 | −3781 | 2819 | −1457 | −3777 | −1728 | −3733 | −3076 | −739 | −2389 | −1180 | −2441 | −1557 | −1893 | −3158 | −3660 | −3038 | 80 |
| — | −149 | −500 | 233 | 43 | −381 | 399 | 106 | −626 | 210 | −466 | −720 | 275 | 394 | 45 | 96 | 359 | 117 | −369 | −294 | −249 | |
| — | −212 | −2909 | −8150 | −273 | −2534 | −701 | −1378 | * | * | | | | | | | | | | | | |
| 76(A) | 2529 | −1119 | −2614 | −2330 | −1245 | −1983 | −1829 | −377 | −2042 | 1435 | −341 | −1937 | −2411 | −1873 | −2088 | −1266 | −1059 | −397 | −2063 | −1713 | 82 |
| — | −149 | −500 | 233 | 43 | −381 | 399 | 106 | −626 | 210 | −466 | −720 | 275 | 394 | 45 | 96 | 359 | 117 | −369 | −294 | −249 | |
| — | −16 | −7108 | −8150 | −894 | −1115 | −701 | −1378 | * | * | | | | | | | | | | | | |
| 77(W) | −472 | −361 | −2421 | −1812 | −298 | −1979 | −826 | 1164 | −1486 | −143 | 2485 | 873 | −2028 | −1185 | −1426 | −1048 | −412 | 1116 | 2999 | −454 | 83 |
| — | −149 | −500 | 233 | 43 | −381 | 399 | 106 | −626 | 210 | −466 | −720 | 275 | 394 | 45 | 96 | 359 | 117 | −369 | −294 | −249 | |
| — | −16 | −7108 | −8150 | −894 | −1115 | −701 | −1378 | * | * | | | | | | | | | | | | |
| 78(P) | −1198 | −1737 | −2187 | −2394 | −3665 | 2006 | −2550 | −3630 | −2743 | −3756 | −3008 | −2052 | 3474 | −2495 | −2835 | −1401 | −1593 | −2736 | −3511 | −3519 | 84 |
| — | −149 | −500 | 233 | 43 | −381 | 399 | 106 | −626 | 210 | −466 | −720 | 275 | 394 | 45 | 96 | 359 | 117 | −369 | −294 | −249 | |
| — | −16 | −7108 | −8150 | −894 | −1115 | −701 | −1378 | * | * | | | | | | | | | | | | |
| 79(Q) | −999 | −1075 | −2106 | −1568 | −726 | −2370 | −1175 | 83 | −1185 | 1373 | 218 | −1566 | −2400 | 2445 | −1340 | −1445 | −946 | 1441 | −1501 | −1146 | 85 |
| — | −149 | −500 | 233 | 43 | −381 | 399 | 106 | −626 | 210 | −466 | −720 | 275 | 394 | 45 | 96 | 359 | 117 | −369 | −294 | −249 | |
| — | −16 | −7108 | −8150 | −894 | −1115 | −701 | −1378 | * | * | | | | | | | | | | | | |
| 80(Q) | −885 | −779 | −2609 | −2018 | −481 | −2414 | −1253 | 1645 | −1736 | 799 | 1924 | −1827 | −2405 | 2262 | −1752 | −1484 | −821 | 802 | −1240 | −935 | 86 |
| — | −149 | −500 | 233 | 43 | −381 | 399 | 106 | −626 | 210 | −466 | −720 | 275 | 394 | 45 | 96 | 359 | 117 | −369 | −294 | −249 | |
| — | −16 | −7108 | −8150 | −894 | −1115 | −701 | −1378 | * | * | | | | | | | | | | | | |
| 81(F) | −3342 | −2776 | −4026 | −4232 | 4354 | −3545 | −1431 | −2315 | −4038 | −1801 | −1900 | −3299 | −3780 | −3350 | −3645 | −3490 | −3420 | −2566 | −739 | 349 | 87 |
| — | −149 | −500 | 233 | 43 | −381 | 399 | 106 | −626 | 210 | −466 | −720 | 275 | 394 | 45 | 96 | 359 | 117 | −369 | −294 | −249 | |
| — | −16 | −7108 | −8150 | −894 | −1115 | −701 | −1378 | * | * | | | | | | | | | | | | |
| 82(G) | −998 | −2100 | −120 | −175 | −2567 | 2528 | 2174 | −2558 | −587 | −2583 | −1806 | 1422 | −1966 | −461 | −1038 | −925 | −1088 | −2095 | −2657 | −1948 | 88 |
| — | −149 | −500 | 233 | 43 | −381 | 399 | 106 | −626 | 210 | −466 | −720 | 275 | 394 | 45 | 96 | 359 | 117 | −369 | −294 | −249 | |
| — | −16 | −7108 | −8150 | −894 | −1115 | −701 | −1378 | * | * | | | | | | | | | | | | |
| 83(T) | −1213 | −1674 | −2755 | −2906 | −3163 | −1922 | −2659 | −2698 | −2788 | −3105 | −2612 | −2311 | −2600 | −2708 | −2753 | −1463 | 3819 | −2197 | −3286 | −3156 | 89 |
| — | −149 | −500 | 233 | 43 | −381 | 399 | 106 | −626 | 210 | −466 | −720 | 275 | 394 | 45 | 96 | 359 | 117 | −369 | −294 | −249 | |
| — | −16 | −7108 | −8150 | −894 | −1115 | −701 | −1378 | * | * | | | | | | | | | | | | |
| 84(I) | −1286 | −1279 | −2907 | −2683 | −1446 | −2549 | −2198 | 3290 | −2407 | −726 | −534 | −2386 | 1172 | −2299 | −2437 | −1895 | −1392 | 283 | −2302 | −1913 | 90 |
| — | −149 | −500 | 233 | 43 | −381 | 399 | 106 | −626 | 210 | −466 | −720 | 275 | 394 | 45 | 96 | 359 | 117 | −369 | −294 | −249 | |
| — | −16 | −7108 | −8150 | −894 | −1115 | −701 | −1378 | * | * | | | | | | | | | | | | |
| 85(T) | −493 | −1105 | −2189 | −2267 | −3101 | 1880 | −2196 | −2791 | −2334 | −3081 | −2269 | −1649 | −2058 | −2099 | −2410 | −719 | 3135 | −1948 | −3282 | −3046 | 91 |
| — | −149 | −500 | 233 | 43 | −381 | 399 | 106 | −626 | 210 | −466 | −720 | 275 | 394 | 45 | 96 | 359 | 117 | −369 | −294 | −249 | |
| — | −16 | −7108 | −8150 | −894 | −1115 | −701 | −1378 | * | * | | | | | | | | | | | | |
| 86(V) | −1750 | −1296 | −4319 | −3957 | −1765 | −4038 | −3733 | 2364 | −3826 | −619 | −543 | −3716 | −3869 | −3685 | −3902 | −3354 | −1743 | 3012 | −3265 | −2817 | 92 |
| — | −149 | −500 | 233 | 43 | −381 | 399 | 106 | −626 | 210 | −466 | −720 | 275 | 394 | 45 | 96 | 359 | 117 | −369 | −294 | −249 | |
| — | −16 | −7108 | −8150 | −894 | −1115 | −701 | −1378 | * | * | | | | | | | | | | | | |
| 87(S) | 923 | −962 | −2348 | −2422 | −3132 | −1207 | −2248 | −2850 | −2440 | −3140 | −2285 | −1624 | −1954 | −2158 | −2477 | 3171 | −758 | −1896 | −3362 | −3103 | 93 |
| — | −149 | −500 | 233 | 43 | −381 | 399 | 106 | −626 | 210 | −466 | −720 | 275 | 394 | 45 | 96 | 359 | 117 | −369 | −294 | −249 | |
| — | −16 | −7108 | −8150 | −894 | −1115 | −701 | −1378 | * | * | | | | | | | | | | | | |
| 88(D) | −2784 | −3432 | 4016 | −1200 | −4140 | −2466 | −2197 | −4505 | −2621 | −4365 | −3956 | −1551 | −3014 | −2039 | −3232 | −2593 | −2938 | −4046 | −3710 | −3552 | 94 |
| — | −149 | −500 | 233 | 43 | −381 | 399 | 106 | −626 | 210 | −466 | −720 | 275 | 394 | 45 | 96 | 359 | 117 | −369 | −294 | −249 | |
| — | −16 | −7108 | −8150 | −894 | −1115 | −701 | −1378 | * | * | | | | | | | | | | | | |
| 89(G) | −2594 | −2690 | −3304 | −3623 | −4328 | 3747 | −3462 | −4761 | −3953 | −4671 | −4212 | −3320 | −3352 | −3748 | −3779 | −2839 | −2981 | −4004 | −3668 | −4222 | 95 |
| — | −149 | −500 | 233 | 43 | −381 | 399 | 106 | −626 | 210 | −466 | −720 | 275 | 394 | 45 | 96 | 359 | 117 | −369 | −294 | −249 | |
| — | −16 | −7108 | −8150 | −894 | −1115 | −701 | −1378 | * | * | | | | | | | | | | | | |
| 90(I) | −1880 | −1493 | −4193 | −3724 | −953 | −3837 | −2980 | 3251 | −3420 | 257 | 2372 | −3485 | −3608 | −3005 | −3310 | −3087 | −1840 | 617 | −2373 | −2155 | 96 |
| — | −149 | −500 | 233 | 43 | −381 | 399 | 106 | −626 | 210 | −466 | −720 | 275 | 394 | 45 | 96 | 359 | 117 | −369 | −294 | −249 | |
| — | −16 | −7108 | −8150 | −894 | −1115 | −701 | −1378 | * | * | | | | | | | | | | | | |
| 91(S) | 2150 | −939 | −2407 | −2415 | −3075 | −1197 | −2205 | −2781 | −2384 | −3065 | −2205 | −1613 | −1936 | −2105 | −2436 | 2652 | −729 | −1850 | −3306 | −3049 | 97 |
| — | −149 | −500 | 233 | 43 | −381 | 399 | 106 | −626 | 210 | −466 | −720 | 275 | 394 | 45 | 96 | 359 | 117 | −369 | −294 | −249 | |
| — | −16 | −7108 | −8150 | −894 | −1115 | −701 | −1378 | * | * | | | | | | | | | | | | |
| 92(M) | −979 | −1455 | −1242 | −1122 | −1434 | −1860 | −1131 | −1171 | −974 | −1285 | 4091 | 2176 | −2226 | −1017 | −1187 | −1166 | −1086 | −1063 | −1929 | −1345 | 98 |
| — | −149 | −500 | 233 | 43 | −381 | 399 | 106 | −626 | 210 | −466 | −720 | 275 | 394 | 45 | 96 | 359 | 117 | −369 | −294 | −249 | |
| — | −16 | −7108 | −8150 | −894 | −1115 | −701 | −1378 | * | * | | | | | | | | | | | | |
| 93(G) | −2594 | −2690 | −3304 | −3623 | −4328 | 3747 | −3462 | −4761 | −3953 | −4671 | −4212 | −3320 | −3352 | −3748 | −3779 | −2839 | −2981 | −4004 | −3668 | −4222 | 99 |
| — | −149 | −500 | 233 | 43 | −381 | 399 | 106 | −626 | 210 | −466 | −720 | 275 | 394 | 45 | 96 | 359 | 117 | −369 | −294 | −249 | |
| — | −16 | −7108 | −8150 | −894 | −1115 | −701 | −1378 | * | * | | | | | | | | | | | | |
| 94(T) | −959 | −1691 | −1249 | −949 | −2563 | −1747 | −929 | −2093 | 1282 | −2263 | −1554 | −995 | −2115 | −600 | −354 | −1037 | 3152 | −1726 | −2494 | −2098 | 100 |
| — | −149 | −500 | 233 | 43 | −381 | 399 | 106 | −626 | 210 | −466 | −720 | 275 | 394 | 45 | 96 | 359 | 117 | −369 | −294 | −249 | |
| — | −16 | −7108 | −8150 | −894 | −1115 | −701 | −1378 | * | * | | | | | | | | | | | | |
| 95(E) | −572 | −1860 | −208 | 2213 | −2107 | −1461 | −191 | −1808 | 199 | −116 | −983 | −127 | 318 | 1199 | −269 | −475 | −517 | −1448 | −2078 | −1441 | 101 |
| — | −149 | −500 | 233 | 43 | −381 | 399 | 106 | −626 | 210 | −466 | −720 | 275 | 394 | 45 | 96 | 359 | 117 | −369 | −294 | −249 | |
| — | −16 | −7108 | −8150 | −894 | −1115 | −701 | −1378 | * | * | | | | | | | | | | | | |
| 96(G) | −2594 | −2690 | −3304 | −3623 | −4328 | 3747 | −3462 | −4761 | −3953 | −4671 | −4212 | −3320 | −3352 | −3748 | −3779 | −2839 | −2981 | −4004 | −3668 | −4222 | 102 |
| — | −149 | −500 | 233 | 43 | −381 | 399 | 106 | −626 | 210 | −466 | −720 | 275 | 394 | 45 | 96 | 359 | 117 | −369 | −294 | −249 | |
| — | −16 | −7108 | −8150 | −894 | −1115 | −701 | −1378 | * | * | | | | | | | | | | | | |
| 97(M) | −2406 | −2296 | −3638 | −3594 | −1525 | −3105 | −2824 | −1047 | −3121 | −596 | 5043 | −3293 | −3425 | −3046 | −2996 | −2911 | −2552 | −1398 | −2513 | −2207 | 103 |
| — | −149 | −500 | 233 | 43 | −381 | 399 | 106 | −626 | 210 | −466 | −720 | 275 | 394 | 45 | 96 | 359 | 117 | −369 | −294 | −249 | |
| — | −16 | −7108 | −8150 | −894 | −1115 | −701 | −1378 | * | * | | | | | | | | | | | | |
| 98(R) | −2097 | −2786 | −2688 | −1415 | −3622 | −2625 | −555 | −2964 | 2585 | −2627 | −1957 | −1318 | −2577 | −137 | 3015 | −1979 | −1791 | −2732 | −2469 | −2363 | 104 |
| — | −149 | −500 | 233 | 43 | −381 | 399 | 106 | −626 | 210 | −466 | −720 | 275 | 394 | 45 | 96 | 359 | 117 | −369 | −294 | −249 | |
| — | −16 | −7108 | −8150 | −894 | −1115 | −701 | −1378 | * | * | | | | | | | | | | | | |
| 99(Y) | −3615 | −2706 | −4169 | −4413 | 2626 | −4044 | −396 | −2535 | −3993 | −1939 | −1985 | −2747 | −3930 | −2852 | −3446 | −3296 | −3494 | −2686 | 347 | 4252 | 105 |
| — | −149 | −500 | 233 | 43 | −381 | 399 | 106 | −626 | 210 | −466 | −720 | 275 | 394 | 45 | 96 | 359 | 117 | −369 | −294 | −249 | |
| — | −16 | −7108 | −8150 | −894 | −1115 | −701 | −1378 | * | * | | | | | | | | | | | | |
| 100(S) | −897 | −1462 | −2333 | −2543 | −3185 | −1640 | −2474 | −3294 | −2686 | −3497 | −2780 | −1973 | −2360 | −2483 | −2703 | 3465 | −1316 | −2413 | −3310 | −3025 | 106 |
| — | −149 | −500 | 233 | 43 | −381 | 399 | 106 | −626 | 210 | −466 | −720 | 275 | 394 | 45 | 96 | 359 | 117 | −369 | −294 | −249 | |
| — | −16 | −7108 | −8150 | −894 | −1115 | −701 | −1378 | * | * | | | | | | | | | | | | |
| 101(L) | −2871 | −2457 | −4231 | −4103 | −1033 | −3803 | −3165 | −541 | −3734 | 3130 | −31 | −3935 | −3797 | −3286 | −3484 | −3713 | −2869 | −1136 | −2394 | −2220 | 107 |
| — | −149 | −500 | 233 | 43 | −381 | 399 | 106 | −626 | 210 | −466 | −720 | 275 | 394 | 45 | 96 | 359 | 117 | −369 | −294 | −249 | |
| — | −16 | −7108 | −8150 | −894 | −1115 | −701 | −1378 | * | * | | | | | | | | | | | | |
| 102(V) | −1381 | −1065 | −3714 | −3252 | −1453 | −3300 | −2646 | 1872 | −3023 | −615 | −373 | −2949 | −3287 | −2816 | −3039 | −2506 | 1346 | 2750 | −2489 | −2087 | 108 |
| — | −149 | −500 | 233 | 43 | −381 | 399 | 106 | −626 | 210 | −466 | −720 | 275 | 394 | 45 | 96 | 359 | 117 | −369 | −294 | −249 | |
| — | −16 | −7108 | −8150 | −894 | −1115 | −701 | −1378 | * | * | | | | | | | | | | | | |
| 103(S) | −897 | −1462 | −2333 | −2543 | −3185 | −1640 | −2474 | −3294 | −2686 | −3497 | −2780 | −1973 | −2360 | −2483 | −2703 | 3465 | −1316 | −2413 | −3310 | −3025 | 109 |
| — | −149 | −500 | 233 | 43 | −381 | 399 | 106 | −626 | 210 | −466 | −720 | 275 | 394 | 45 | 96 | 359 | 117 | −369 | −294 | −249 | |
| — | −16 | −7108 | −8150 | −894 | −1115 | −701 | −1378 | * | * | | | | | | | | | | | | |
| 104(R) | −2957 | −3022 | −3318 | −2735 | −3796 | −2998 | −1968 | −3912 | −846 | −3631 | −3157 | −2611 | −3280 | −1724 | 4056 | −3026 | −2913 | −3650 | −3096 | −3185 | 110 |
| — | −149 | −500 | 233 | 43 | −381 | 399 | 106 | −626 | 210 | −466 | −720 | 275 | 394 | 45 | 96 | 359 | 117 | −369 | −294 | −249 | |
| — | −16 | −7108 | −8150 | −894 | −1115 | −701 | −1378 | * | * | | | | | | | | | | | | |
| 105(E) | −1719 | −3572 | 2596 | 2779 | −3767 | −1632 | −993 | −3700 | −1241 | −3578 | −2920 | −234 | −2167 | −666 | −2090 | −1380 | −1789 | −3182 | −3742 | −2756 | 111 |
| — | −149 | −500 | 233 | 43 | −381 | 399 | 106 | −626 | 210 | −466 | −720 | 275 | 394 | 45 | 96 | 359 | 117 | −369 | −294 | −249 | |
| — | −16 | −7108 | −8150 | −894 | −1115 | −701 | −1378 | * | * | | | | | | | | | | | | |
| 106(V) | −1746 | −1296 | −4308 | −3946 | −1757 | −4020 | −3712 | 2190 | −3811 | −614 | −539 | −3702 | −3858 | −3667 | −3884 | −3336 | −1740 | 3098 | −3250 | −2803 | 112 |
| — | −149 | −500 | 233 | 43 | −381 | 399 | 106 | −626 | 210 | −466 | −720 | 275 | 394 | 45 | 96 | 359 | 117 | −369 | −294 | −249 | |
| — | −16 | −7108 | −8150 | −894 | −1115 | −701 | −1378 | * | * | | | | | | | | | | | | |
| 107(I) | −2091 | −1746 | −3971 | −3840 | −1676 | −3532 | −3289 | 3684 | −3581 | −659 | −693 | −3562 | −3674 | −3445 | −3521 | −3194 | −2146 | 449 | −2877 | −2493 | 113 |
| — | −149 | −500 | 233 | 43 | −381 | 399 | 106 | −626 | 210 | −466 | −720 | 275 | 394 | 45 | 96 | 359 | 117 | −369 | −294 | −249 | |
| — | −16 | −7108 | −8150 | −894 | −1115 | −701 | −1378 | * | * | | | | | | | | | | | | |
| 108(A) | 3438 | −1472 | −2846 | −3040 | −3287 | −1726 | −2735 | −2840 | −3028 | −3257 | −2662 | −2236 | −2447 | −2798 | −2944 | −1216 | −1387 | −2183 | −3405 | −3320 | 114 |
| — | −149 | −500 | 233 | 43 | −381 | 399 | 106 | −626 | 210 | −466 | −720 | 275 | 394 | 45 | 96 | 359 | 117 | −369 | −294 | −249 | |
| — | −16 | −7108 | −8150 | −894 | −1115 | −701 | −1378 | * | * | | | | | | | | | | | | |
| 109(D) | −2784 | −3432 | 4016 | −1200 | −4140 | −2466 | −2197 | −4505 | −2621 | −4365 | −3956 | −1551 | −3014 | −2039 | −3232 | −2593 | −2938 | −4046 | −3710 | −3552 | 115 |
| — | −149 | −500 | 233 | 43 | −381 | 399 | 106 | −626 | 210 | −466 | −720 | 275 | 394 | 45 | 96 | 359 | 117 | −369 | −294 | −249 | |
| — | −16 | −7108 | −8150 | −894 | −1115 | −701 | −1378 | * | * | | | | | | | | | | | | |
| 110(S) | −352 | 2942 | −2955 | −2957 | −2876 | −1254 | −2382 | −2573 | −2692 | −2927 | −2128 | −1827 | −2001 | −2405 | −2607 | 3103 | −778 | −1757 | −3171 | −2911 | 116 |
| — | −149 | −500 | 233 | 43 | −381 | 399 | 106 | −626 | 210 | −466 | −720 | 275 | 394 | 45 | 96 | 359 | 117 | −369 | −294 | −249 | |
| — | −16 | −7108 | −8150 | −894 | −1115 | −701 | −1378 | * | * | | | | | | | | | | | | |
| 111(I) | −2091 | −1746 | −3971 | −3840 | −1676 | −3532 | −3289 | 3684 | −3581 | −659 | −693 | −3562 | −3674 | −3445 | −3521 | −3194 | −2146 | 449 | −2877 | −2493 | 117 |
| — | −149 | −500 | 233 | 43 | −381 | 399 | 106 | −626 | 210 | −466 | −720 | 275 | 394 | 45 | 96 | 359 | 117 | −369 | −294 | −249 | |
| — | −16 | −7108 | −8150 | −894 | −1115 | −701 | −1378 | * | * | | | | | | | | | | | | |
| 112(E) | −2641 | −3308 | −896 | 3732 | −3966 | −2458 | −2043 | −4105 | −2128 | −4016 | −3555 | −1531 | −2959 | −1842 | −2560 | −2479 | −2750 | −3722 | −3563 | −3385 | 118 |
| — | −149 | −500 | 233 | 43 | −381 | 399 | 106 | −626 | 210 | −466 | −720 | 275 | 394 | 45 | 96 | 359 | 117 | −369 | −294 | −249 | |
| — | −16 | −7108 | −8150 | −894 | −1115 | −701 | −1378 | * | * | | | | | | | | | | | | |
| 113(T) | 1556 | −936 | −2493 | −2457 | −2805 | −1256 | −2159 | −2210 | −2319 | −2681 | −1932 | −1656 | −1974 | −2089 | −2352 | −598 | 3235 | −1547 | −3111 | −2847 | 119 |
| — | −149 | −500 | 233 | 43 | −381 | 399 | 106 | −626 | 210 | −466 | −720 | 275 | 394 | 45 | 96 | 359 | 117 | −369 | −294 | −249 | |
| — | −16 | −7108 | −8150 | −894 | −1115 | −701 | −1378 | * | * | | | | | | | | | | | | |
| 114(C) | 1784 | 2119 | −2013 | −1532 | −1093 | −1580 | −1089 | −436 | −1322 | −937 | −273 | 1093 | −1932 | −1127 | −1472 | −748 | −515 | 1585 | −1536 | −1163 | 120 |
| — | −149 | −500 | 233 | 43 | −381 | 399 | 106 | −626 | 210 | −466 | −720 | 275 | 394 | 45 | 96 | 359 | 117 | −369 | −294 | −249 | |
| — | −16 | −7108 | −8150 | −894 | −1115 | −701 | −1378 | * | * | | | | | | | | | | | | |
| 115(M) | 1831 | 2019 | −2596 | −2038 | −605 | −1979 | −1126 | 244 | −1727 | −359 | 2501 | −1655 | −2145 | −1435 | −1683 | −1106 | −557 | 1087 | −1153 | −804 | 121 |
| — | −149 | −500 | 233 | 43 | −381 | 399 | 106 | −626 | 210 | −466 | −720 | 275 | 394 | 45 | 96 | 359 | 117 | −369 | −294 | −249 | |
| — | −16 | −7108 | −8150 | −894 | −1115 | −701 | −1378 | * | * | | | | | | | | | | | | |
| 116(Q) | −987 | −2211 | −43 | −62 | −2833 | 2229 | −691 | −2616 | −407 | −2604 | −1797 | 1197 | −1917 | 2260 | −858 | −880 | −1045 | −2139 | −2772 | −2099 | 122 |
| — | −149 | −500 | 233 | 43 | −381 | 399 | 106 | −626 | 210 | −466 | −720 | 275 | 394 | 45 | 96 | 359 | 117 | −369 | −294 | −249 | |
| — | −16 | −7108 | −8150 | −894 | −1115 | −701 | −1378 | * | * | | | | | | | | | | | | |
| 117(G) | 2313 | −1042 | −2391 | −2526 | −3250 | 2601 | −2372 | −2972 | −2637 | −3257 | −2407 | −1721 | −2032 | −2310 | −2646 | −662 | −859 | −2003 | −3434 | −3247 | 123 |
| — | −149 | −500 | 233 | 43 | −381 | 399 | 106 | −626 | 210 | −466 | −720 | 275 | 394 | 45 | 96 | 359 | 117 | −369 | −294 | −249 | |
| — | −16 | −7108 | −8150 | −894 | −1115 | −701 | −1378 | * | * | | | | | | | | | | | | |
| 118(Q) | −914 | −2350 | −48 | 1661 | −2621 | −1571 | 2504 | −2400 | 68 | −2331 | −1486 | −201 | −1796 | 2646 | −351 | −754 | −865 | −1984 | −2463 | −1787 | 124 |
| — | −149 | −500 | 233 | 43 | −381 | 399 | 106 | −626 | 210 | −466 | −720 | 275 | 394 | 45 | 96 | 359 | 117 | −369 | −294 | −249 | |
| — | −16 | −7108 | −8150 | −894 | −1115 | −701 | −1378 | * | * | | | | | | | | | | | | |
| 119(W) | −517 | −1294 | −733 | −183 | −1062 | −1605 | −234 | −1037 | 19 | −1207 | −456 | 1435 | −1690 | 33 | 756 | 411 | −454 | −819 | 3340 | 1286 | 125 |
| — | −149 | −500 | 233 | 43 | −381 | 399 | 106 | −626 | 210 | −466 | −720 | 275 | 394 | 45 | 96 | 359 | 117 | −369 | −294 | −249 | |
| — | −16 | −7108 | −8150 | −894 | −1115 | −701 | −1378 | * | * | | | | | | | | | | | | |
| 120(M) | 410 | −469 | −2417 | −1828 | −341 | −2041 | −897 | 195 | −1513 | −156 | 3130 | −1534 | −2102 | −1230 | −1484 | −1117 | −507 | 954 | −894 | 2253 | 126 |
| — | −149 | −500 | 233 | 43 | −381 | 399 | 106 | −626 | 210 | −466 | −720 | 275 | 394 | 45 | 96 | 359 | 117 | −369 | −294 | −249 | |
| — | −16 | −7108 | −8150 | −894 | −1115 | −701 | −1378 | * | * | | | | | | | | | | | | |
| 121(D) | −2784 | −3432 | 4016 | −1200 | −4140 | −2466 | −2197 | −4505 | −2621 | −4365 | −3956 | −1551 | −3014 | −2039 | −3232 | −2593 | −2938 | −4046 | −3710 | −3552 | 127 |
| — | −149 | −500 | 233 | 43 | −381 | 399 | 106 | −626 | 210 | −466 | −720 | 275 | 394 | 45 | 96 | 359 | 117 | −369 | −294 | −249 | |
| — | −16 | −7108 | −8150 | −894 | −1115 | −701 | −1378 | * | * | | | | | | | | | | | | |
| 122(G) | 2142 | −930 | −2334 | −2298 | −3100 | 2237 | −2139 | −2842 | −2302 | −3074 | −2187 | −1557 | −1909 | −2010 | −2397 | 1136 | −701 | −1871 | −3308 | −3053 | 128 |
| — | −149 | −500 | 233 | 43 | −381 | 399 | 106 | −626 | 210 | −466 | −720 | 275 | 394 | 45 | 96 | 359 | 117 | −369 | −294 | −249 | |
| — | −16 | −7108 | −8150 | −894 | −1115 | −701 | −1378 | * | * | | | | | | | | | | | | |
| 123(V) | −1514 | −1144 | −3950 | −3459 | 1821 | −3487 | −2577 | 2274 | −3208 | −209 | −87 | −3112 | −3362 | −2864 | −3118 | −2680 | −1476 | 2426 | −2194 | −1786 | 129 |
| — | −149 | −500 | 233 | 43 | −381 | 399 | 106 | −626 | 210 | −466 | −720 | 275 | 394 | 45 | 96 | 359 | 117 | −369 | −294 | −249 | |
| — | −16 | −7108 | −8150 | −894 | −1115 | −701 | −1378 | * | * | | | | | | | | | | | | |
| 124(V) | −1743 | −1294 | −4292 | −3873 | −1511 | −3988 | −3433 | 2287 | −3712 | 598 | −319 | −3626 | −3774 | −3456 | −3716 | −3260 | −1717 | 2790 | −2931 | −2577 | 130 |
| — | −149 | −500 | 233 | 43 | −381 | 399 | 106 | −626 | 210 | −466 | −720 | 275 | 394 | 45 | 96 | 359 | 117 | −369 | −294 | −249 | |
| — | −16 | −7108 | −8150 | −894 | −1115 | −701 | −1378 | * | * | | | | | | | | | | | | |
| 125(A) | 2911 | −954 | −2808 | −2665 | −2115 | −1577 | −2196 | −575 | −2445 | −1646 | −1202 | −1906 | −2208 | −2218 | −2451 | −901 | −876 | 1294 | −2727 | −2394 | 131 |
| — | −149 | −500 | 233 | 43 | −381 | 399 | 106 | −626 | 210 | −466 | −720 | 275 | 394 | 45 | 96 | 359 | 117 | −369 | −294 | −249 | |
| — | −16 | −7108 | −8150 | −894 | −1115 | −701 | −1378 | * | * | | | | | | | | | | | | |
| 126(I) | −1764 | −1323 | −4298 | −3936 | −1668 | −3994 | −3655 | 3337 | −3783 | −508 | −462 | −3689 | −3838 | −3608 | −3835 | −3311 | −1759 | 1847 | −3164 | −2747 | 132 |
| — | −149 | −500 | 233 | 43 | −381 | 399 | 106 | −626 | 210 | −466 | −720 | 275 | 394 | 45 | 96 | 359 | 117 | −369 | −294 | −249 | |
| — | −16 | −7108 | −8150 | −894 | −1115 | −701 | −1378 | * | * | | | | | | | | | | | | |
| 127(G) | −1157 | −1705 | −2169 | −2375 | −3654 | 3021 | −2534 | −3611 | −2730 | −3741 | −2984 | −2024 | 2418 | −2475 | −2826 | −1361 | −1555 | −2705 | −3513 | −3509 | 133 |
| — | −149 | −500 | 233 | 43 | −381 | 399 | 106 | −626 | 210 | −466 | −720 | 275 | 394 | 45 | 96 | 359 | 117 | −369 | −294 | −249 | |
| — | −16 | −7108 | −8150 | −894 | −1115 | −701 | −1378 | * | * | | | | | | | | | | | | |
| 128(G) | −2594 | −2690 | −3304 | −3623 | −4328 | 3747 | −3462 | −4761 | −3953 | −4671 | −4212 | −3320 | −3352 | −3748 | −3779 | −2839 | −2981 | −4004 | −3668 | −4222 | 134 |
| — | −149 | −500 | 233 | 43 | −381 | 399 | 106 | −626 | 210 | −466 | −720 | 275 | 394 | 45 | 96 | 359 | 117 | −369 | −294 | −249 | |
| — | −16 | −7108 | −8150 | −894 | −1115 | −701 | −1378 | * | * | | | | | | | | | | | | |
| 129(C) | −2476 | 5735 | −4102 | −4358 | −3712 | −2763 | −3545 | −3518 | −4167 | −3859 | −3569 | −3631 | −3363 | −4030 | −3832 | −2793 | −2860 | −3158 | −3464 | −3718 | 135 |
| — | −149 | −500 | 233 | 43 | −381 | 399 | 106 | −626 | 210 | −466 | −720 | 275 | 394 | 45 | 96 | 359 | 117 | −369 | −294 | −249 | |
| — | −16 | −7108 | −8150 | −894 | −1115 | −701 | −1378 | * | * | | | | | | | | | | | | |
| 130(D) | −2784 | −3432 | 4016 | −1200 | −4140 | −2466 | −2197 | −4505 | −2621 | −4365 | −3956 | −1551 | −3014 | −2039 | −3232 | −2593 | −2938 | −4046 | −3710 | −3552 | 136 |
| — | −149 | −500 | 233 | 43 | −381 | 399 | 106 | −626 | 210 | −466 | −720 | 275 | 394 | 45 | 96 | 359 | 117 | −369 | −294 | −249 | |
| — | −16 | −7108 | −8150 | −894 | −1115 | −701 | −1378 | * | * | | | | | | | | | | | | |
| 131(K) | −2620 | −2961 | −2461 | −2046 | −3743 | −2791 | −1570 | −3603 | 3784 | −3387 | −2839 | −2048 | −3039 | −1260 | −465 | −2604 | −2536 | −3331 | −3001 | −2988 | 137 |
| — | −149 | −500 | 233 | 43 | −381 | 399 | 106 | −626 | 210 | −466 | −720 | 275 | 394 | 45 | 96 | 359 | 117 | −369 | −294 | −249 | |
| — | −16 | −7108 | −8150 | −894 | −1115 | −701 | −1378 | * | * | | | | | | | | | | | | |
| 132(N) | −2171 | −2655 | −1458 | −1748 | −3334 | −2364 | −2267 | −3943 | −2365 | −3936 | −3437 | 4205 | −2932 | −2205 | −2608 | −2224 | −2439 | −3392 | −3253 | −2909 | 138 |
| — | −149 | −500 | 233 | 43 | −381 | 399 | 106 | −626 | 210 | −466 | −720 | 275 | 394 | 45 | 96 | 359 | 117 | −369 | −294 | −249 | |
| — | −16 | −7108 | −8150 | −894 | −1115 | −701 | −1378 | * | * | | | | | | | | | | | | |
| 133(M) | −2406 | −2296 | −3638 | −3594 | −1525 | −3105 | −2824 | −1047 | −3121 | −596 | 5043 | −3293 | −3425 | −3046 | −2996 | −2911 | −2552 | −1398 | −2513 | −2207 | 139 |
| — | −149 | −500 | 233 | 43 | −381 | 399 | 106 | −626 | 210 | −466 | −720 | 275 | 394 | 45 | 96 | 359 | 117 | −369 | −294 | −249 | |
| — | −16 | −7108 | −8150 | −894 | −1115 | −701 | −1378 | * | * | | | | | | | | | | | | |
| 134(P) | −2931 | −2878 | −3420 | −3706 | −4181 | −2925 | −3468 | −4621 | −3859 | −4490 | −4165 | −3491 | 4225 | −3781 | −3695 | −3182 | −3279 | −4087 | −3594 | −4064 | 140 |
| — | −149 | −500 | 233 | 43 | −381 | 399 | 106 | −626 | 210 | −466 | −720 | 275 | 394 | 45 | 96 | 359 | 117 | −369 | −294 | −249 | |
| — | −16 | −7108 | −8150 | −894 | −1115 | −701 | −1378 | * | * | | | | | | | | | | | | |
| 135(G) | −2594 | −2690 | −3304 | −3623 | −4328 | 3747 | −3462 | −4761 | −3953 | −4671 | −4212 | −3320 | −3352 | −3748 | −3779 | −2839 | −2981 | −4004 | −3668 | −4222 | 141 |
| — | −149 | −500 | 233 | 43 | −381 | 399 | 106 | −626 | 210 | −466 | −720 | 275 | 394 | 45 | 96 | 359 | 117 | −369 | −294 | −249 | |
| — | −16 | −7108 | −8150 | −894 | −1115 | −701 | −1378 | * | * | | | | | | | | | | | | |
| 136(A) | 2180 | −935 | −2286 | −2196 | −3057 | 1098 | −2058 | −2796 | −2174 | −3021 | −2134 | −1516 | −1898 | −1906 | −2302 | 2146 | −689 | −1849 | −3256 | −2983 | 142 |
| — | −149 | −500 | 233 | 43 | −381 | 399 | 106 | −626 | 210 | −466 | −720 | 275 | 394 | 45 | 96 | 359 | 117 | −369 | −294 | −249 | |
| — | −16 | −7108 | −8150 | −894 | −1115 | −701 | −1378 | * | * | | | | | | | | | | | | |
| 137(M) | −1799 | −1433 | −4142 | −3579 | −669 | −3668 | −2608 | 1558 | −3293 | 1235 | 3799 | −3296 | −3401 | −2717 | −3088 | −2843 | −1726 | 1156 | −2002 | −1868 | 143 |
| — | −149 | −500 | 233 | 43 | −381 | 399 | 106 | −626 | 210 | −466 | −720 | 275 | 394 | 45 | 96 | 359 | 117 | −369 | −294 | −249 | |
| — | −16 | −7108 | −8150 | −894 | −1115 | −701 | −1378 | * | * | | | | | | | | | | | | |
| 138(I) | −2091 | −1746 | −3971 | −3840 | −1676 | −3532 | −3289 | 3684 | −3581 | −659 | −693 | −3562 | −3674 | −3445 | −3521 | −3194 | −2146 | 449 | −2877 | −2493 | 144 |
| — | −149 | −500 | 233 | 43 | −381 | 399 | 106 | −626 | 210 | −466 | −720 | 275 | 394 | 45 | 96 | 359 | 117 | −369 | −294 | −249 | |
| — | −16 | −7108 | −8150 | −894 | −1115 | −701 | −1378 | * | * | | | | | | | | | | | | |
| 139(A) | 3103 | −1036 | −2445 | −2572 | −3222 | 1051 | −2380 | −2930 | −2650 | −3226 | −2381 | −1739 | −2034 | −2327 | −2648 | −664 | −857 | −1981 | −3412 | −3228 | 145 |
| — | −149 | −500 | 233 | 43 | −381 | 399 | 106 | −626 | 210 | −466 | −720 | 275 | 394 | 45 | 96 | 359 | 117 | −369 | −294 | −249 | |
| — | −16 | −7108 | −8150 | −894 | −1115 | −701 | −1378 | * | * | | | | | | | | | | | | |
| 140(M) | −2325 | −1891 | −4598 | −4012 | −498 | −4222 | −3013 | 1242 | −3722 | 1864 | 3929 | −3855 | −3711 | −2910 | −3414 | −3439 | −2215 | −299 | −2076 | −2098 | 146 |
| — | −149 | −500 | 233 | 43 | −381 | 399 | 106 | −626 | 210 | −466 | −720 | 275 | 394 | 45 | 96 | 359 | 117 | −369 | −294 | −249 | |
| — | −16 | −7108 | −8150 | −894 | −1115 | −701 | −1378 | * | * | | | | | | | | | | | | |
| 141(A) | 3103 | −1036 | −2445 | −2572 | −3222 | 1051 | −2380 | −2930 | −2650 | −3226 | −2381 | −1739 | −2034 | −2327 | −2648 | −664 | −857 | −1981 | −3412 | −3228 | 147 |
| — | −149 | −500 | 233 | 43 | −381 | 399 | 106 | −626 | 210 | −466 | −720 | 275 | 394 | 45 | 96 | 359 | 117 | −369 | −294 | −249 | |
| — | −16 | −7108 | −8150 | −894 | −1115 | −701 | −1378 | * | * | | | | | | | | | | | | |
| 142(R) | −1588 | −2442 | −1399 | −953 | −3069 | −2171 | −708 | −2795 | 373 | −2625 | −1916 | 1858 | −2357 | −324 | 3294 | −1520 | −1505 | −2453 | −2523 | −2186 | 148 |
| — | −149 | −500 | 233 | 43 | −381 | 399 | 106 | −626 | 210 | −466 | −720 | 275 | 394 | 45 | 96 | 359 | 117 | −369 | −294 | −249 | |
| — | −16 | −7108 | −8150 | −894 | −1115 | −701 | −1378 | * | * | | | | | | | | | | | | |
| 143(M) | −1448 | −1256 | −3396 | −2819 | −474 | −3024 | −1923 | 175 | −2473 | 2225 | 2756 | −2574 | −2922 | −2063 | −2375 | −2153 | 952 | −151 | −1599 | −1410 | 149 |
| — | −149 | −500 | 233 | 43 | −381 | 399 | 106 | −626 | 210 | −466 | −720 | 275 | 394 | 45 | 96 | 359 | 117 | −369 | −294 | −249 | |
| — | −16 | −7108 | −8150 | −894 | −1115 | −701 | −1378 | * | * | | | | | | | | | | | | |
| 144(N) | −1662 | −3306 | 2055 | 78 | −3621 | −1643 | −1040 | −3622 | −1272 | −3531 | −2870 | 3477 | −2182 | −724 | −2071 | −1371 | −1757 | −3092 | −3633 | −2700 | 150 |
| — | −149 | −500 | 233 | 43 | −381 | 399 | 106 | −626 | 210 | −466 | −720 | 275 | 394 | 45 | 96 | 359 | 117 | −369 | −294 | −249 | |
| — | −16 | −7108 | −8150 | −894 | −1115 | −701 | −1378 | * | * | | | | | | | | | | | | |
| 145(I) | −1066 | −921 | −2828 | −2239 | −1041 | −2675 | −1601 | 2235 | −1668 | −455 | −92 | −2067 | −2692 | −1688 | 1701 | −1795 | −1024 | 1960 | −1771 | −1396 | 151 |
| — | −149 | −500 | 233 | 43 | −381 | 399 | 106 | −626 | 210 | −466 | −720 | 275 | 394 | 45 | 96 | 359 | 117 | −369 | −294 | −249 | |
| — | −16 | −7108 | −8150 | −894 | −1115 | −701 | −1378 | * | * | | | | | | | | | | | | |
| 146(P) | −2931 | −2878 | −3420 | −3706 | −4181 | −2925 | −3468 | −4621 | −3859 | −4490 | −4165 | −3491 | 4225 | −3781 | −3695 | −3182 | −3279 | −4087 | −3594 | −4064 | 152 |
| — | −149 | −500 | 233 | 43 | −381 | 399 | 106 | −626 | 210 | −466 | −720 | 275 | 394 | 45 | 96 | 359 | 117 | −369 | −294 | −249 | |
| — | −16 | −7108 | −8150 | −894 | −1115 | −701 | −1378 | * | * | | | | | | | | | | | | |
| 147(S) | 1568 | −940 | −2267 | −2192 | −3082 | 1101 | −2068 | −2826 | −2185 | −3049 | −2159 | −1515 | −1901 | −1915 | −2313 | 2603 | −694 | −1866 | −3279 | −3006 | 153 |
| — | −149 | −500 | 233 | 43 | −381 | 399 | 106 | −626 | 210 | −466 | −720 | 275 | 394 | 45 | 96 | 359 | 117 | −369 | −294 | −249 | |
| — | −16 | −7108 | −8150 | −894 | −1115 | −701 | −1378 | * | * | | | | | | | | | | | | |
| 148(I) | −1880 | −1492 | −4195 | −3728 | −963 | −3841 | −2991 | 3272 | −3425 | 246 | 2277 | −3490 | −3613 | −3014 | −3317 | −3092 | −1841 | 628 | −2385 | −2163 | 154 |
| — | −149 | −500 | 233 | 43 | −381 | 399 | 106 | −626 | 210 | −466 | −720 | 275 | 394 | 45 | 96 | 359 | 117 | −369 | −294 | −249 | |
| — | −16 | −7108 | −8150 | −894 | −1115 | −701 | −1378 | * | * | | | | | | | | | | | | |
| 149(F) | −2204 | −1797 | −3724 | −3473 | 3206 | −3383 | −628 | −1077 | −3092 | −746 | 3167 | −2502 | −3309 | −2372 | −2792 | −2535 | −2120 | −1245 | 28 | 2460 | 155 |
| — | −149 | −500 | 233 | 43 | −381 | 399 | 106 | −626 | 210 | −466 | −720 | 275 | 394 | 45 | 96 | 359 | 117 | −369 | −294 | −249 | |
| — | −16 | −7108 | −8150 | −894 | −1115 | −701 | −1378 | * | * | | | | | | | | | | | | |
| 150(V) | 1265 | −1028 | −3200 | −2994 | −1833 | −2150 | −2480 | 417 | −2771 | −1122 | −818 | −2349 | −2640 | −2559 | −2766 | −1464 | −1118 | 3028 | −2700 | −2325 | 156 |
| — | −149 | −500 | 233 | 43 | −381 | 399 | 106 | −626 | 210 | −466 | −720 | 275 | 394 | 45 | 96 | 359 | 117 | −369 | −294 | −249 | |
| — | −16 | −7108 | −8150 | −894 | −1115 | −701 | −1378 | * | * | | | | | | | | | | | | |
| 151(Y) | −3482 | −2868 | −3701 | −3919 | 238 | −3552 | −1112 | −3000 | −3638 | −2516 | −2526 | −3027 | −3772 | −3101 | −3341 | −3418 | −3527 | −3071 | −441 | 4711 | 157 |
| — | −149 | −500 | 233 | 43 | −381 | 399 | 106 | −626 | 210 | −466 | −720 | 275 | 394 | 45 | 96 | 359 | 117 | −369 | −294 | −249 | |
| — | −16 | −7108 | −8150 | −894 | −1115 | −701 | −1378 | * | * | | | | | | | | | | | | |
| 152(G) | −2594 | −2690 | −3304 | −3623 | −4328 | 3747 | −3462 | −4761 | −3953 | −4671 | −4212 | −3320 | −3352 | −3748 | −3779 | −2839 | −2981 | −4004 | −3668 | −4222 | 158 |
| — | −149 | −500 | 233 | 43 | −381 | 399 | 106 | −626 | 210 | −466 | −720 | 275 | 394 | 45 | 96 | 359 | 117 | −369 | −294 | −249 | |
| — | −16 | −7108 | −8150 | −894 | −1115 | −701 | −1378 | * | * | | | | | | | | | | | | |
| 153(G) | −2594 | −2690 | −3304 | −3623 | −4328 | 3747 | −3462 | −4761 | −3953 | −4671 | −4212 | −3320 | −3352 | −3748 | −3779 | −2839 | −2981 | −4004 | −3668 | −4222 | 159 |
| — | −149 | −500 | 233 | 43 | −381 | 399 | 106 | −626 | 210 | −466 | −720 | 275 | 394 | 45 | 96 | 359 | 117 | −369 | −294 | −249 | |
| — | −16 | −7108 | −8150 | −894 | −1115 | −701 | −1378 | * | * | | | | | | | | | | | | |
| 154(T) | −359 | −976 | −2225 | −2229 | −2900 | −1242 | −2074 | −2560 | −2170 | −2875 | −2064 | −1561 | −1958 | −1969 | −2247 | 1110 | 3375 | −1760 | −3152 | −2850 | 160 |
| — | −149 | −500 | 233 | 43 | −381 | 399 | 106 | −626 | 210 | −466 | −720 | 275 | 394 | 45 | 96 | 359 | 117 | −369 | −294 | −249 | |
| — | −16 | −7108 | −8150 | −894 | −1115 | −701 | −1378 | * | * | | | | | | | | | | | | |
| 155(I) | −2091 | −1746 | −3971 | −3840 | −1676 | −3532 | −3289 | 3684 | −3581 | −659 | −693 | −3562 | −3674 | −3445 | −3521 | −3194 | −2146 | 449 | −2877 | −2493 | 161 |
| — | −149 | −500 | 233 | 43 | −381 | 399 | 106 | −626 | 210 | −466 | −720 | 275 | 394 | 45 | 96 | 359 | 117 | −369 | −294 | −249 | |
| — | −16 | −7108 | −8150 | −894 | −1115 | −701 | −1378 | * | * | | | | | | | | | | | | |
| 156(H) | 861 | −1924 | −384 | 1010 | −2260 | −1477 | 1787 | −1974 | 1769 | −1918 | −1022 | −120 | −1566 | 362 | 697 | −417 | −459 | −1557 | −2073 | −1446 | 162 |
| — | −149 | −500 | 233 | 43 | −381 | 399 | 106 | −626 | 210 | −466 | −720 | 275 | 394 | 45 | 96 | 359 | 117 | −369 | −294 | −249 | |
| — | −16 | −7108 | −8150 | −894 | −1115 | −701 | −1378 | * | * | | | | | | | | | | | | |
| 157(P) | −655 | −1502 | −711 | −557 | −2204 | −1463 | 2143 | −2122 | −586 | −2233 | −1445 | −688 | 2941 | −560 | −941 | 855 | −805 | −1657 | −2369 | −1763 | 163 |
| — | −149 | −500 | 233 | 43 | −381 | 399 | 106 | −626 | 210 | −466 | −720 | 275 | 394 | 45 | 96 | 359 | 117 | −369 | −294 | −249 | |
| — | −16 | −7108 | −8150 | −894 | −1115 | −701 | −1378 | * | * | | | | | | | | | | | | |
| 158(G) | −2594 | −2690 | −3304 | −3623 | −4328 | 3747 | −3462 | −4761 | −3953 | −4671 | −4212 | −3320 | −3352 | −3748 | −3779 | −2839 | −2981 | −4004 | −3668 | −4222 | 164 |
| — | −149 | −500 | 233 | 43 | −381 | 399 | 106 | −626 | 210 | −466 | −720 | 275 | 394 | 45 | 96 | 359 | 117 | −369 | −294 | −249 | |
| — | −16 | −7108 | −8150 | −894 | −1115 | −701 | −1378 | * | * | | | | | | | | | | | | |
| 159(H) | −744 | −2193 | −114 | 1118 | −2513 | −1512 | 2486 | −2252 | 1178 | −2183 | −1308 | 2230 | −1689 | 180 | −233 | −598 | −687 | −1823 | −2335 | −1670 | 165 |
| — | −149 | −500 | 233 | 43 | −381 | 399 | 106 | −626 | 210 | −466 | −720 | 275 | 394 | 45 | 96 | 359 | 117 | −369 | −294 | −249 | |
| — | −16 | −7108 | −8150 | −894 | −1115 | −701 | −1378 | * | * | | | | | | | | | | | | |
| 160(W) | −2672 | −2139 | −3850 | −3748 | 941 | −3611 | −469 | −1691 | −3306 | 1047 | −1217 | −2551 | −3534 | −2514 | −2960 | −2788 | −2577 | −1799 | 4205 | 3466 | 166 |
| — | −149 | −500 | 233 | 43 | −381 | 399 | 106 | −626 | 210 | −466 | −720 | 275 | 394 | 45 | 96 | 359 | 117 | −369 | −294 | −249 | |
| — | −16 | −7108 | −8150 | −894 | −1115 | −701 | −1378 | * | * | | | | | | | | | | | | |
| 161(K) | 386 | −1981 | 779 | 279 | −2295 | −1403 | −114 | −2043 | 2059 | −1991 | −1082 | 941 | −1536 | 1263 | −211 | −384 | −457 | −1602 | −2161 | −1476 | 167 |
| — | −149 | −500 | 233 | 43 | −381 | 399 | 106 | −626 | 210 | −466 | −720 | 275 | 394 | 45 | 96 | 359 | 117 | −369 | −294 | −249 | |
| — | −16 | −7108 | −8150 | −894 | −1115 | −701 | −1378 | * | * | | | | | | | | | | | | |
| 162(G) | −2594 | −2690 | −3304 | −3623 | −4328 | 3747 | −3462 | −4761 | −3953 | −4671 | −4212 | −3320 | −3352 | −3748 | −3779 | −2839 | −2981 | −4004 | −3668 | −4222 | 168 |
| — | −149 | −500 | 233 | 43 | −381 | 399 | 106 | −626 | 210 | −466 | −720 | 275 | 394 | 45 | 96 | 359 | 117 | −369 | −294 | −249 | |
| — | −16 | −7108 | −8150 | −894 | −1115 | −701 | −1378 | * | * | | | | | | | | | | | | |
| 163(K) | −1144 | −2365 | −912 | 2048 | −2856 | −1912 | −326 | −2459 | 2267 | −2295 | −1482 | −556 | −1989 | 108 | 1334 | −1013 | −1014 | −2093 | −2324 | −1881 | 169 |
| — | −149 | −500 | 233 | 43 | −381 | 399 | 106 | −626 | 210 | −466 | −720 | 275 | 394 | 45 | 96 | 359 | 117 | −369 | −294 | −249 | |
| — | −16 | −7108 | −8150 | −894 | −1115 | −701 | −1378 | * | * | | | | | | | | | | | | |
| 164(D) | −1091 | −2610 | 2941 | 174 | −2957 | −1527 | −595 | −2750 | 1084 | −2696 | −1877 | −176 | −1885 | −206 | −1006 | 740 | −1098 | −2288 | −2880 | −2105 | 170 |
| — | −149 | −500 | 233 | 43 | −381 | 399 | 106 | −626 | 210 | −466 | −720 | 275 | 394 | 45 | 96 | 359 | 117 | −369 | −294 | −249 | |
| — | −16 | −7108 | −8150 | −894 | −1115 | −701 | −1378 | * | * | | | | | | | | | | | | |
| 165(L) | −2387 | −1922 | −4674 | −4155 | −617 | −4366 | −3250 | 1889 | −3865 | 2650 | 558 | −4023 | −3847 | −3098 | −3586 | −3647 | −2296 | −38 | −2247 | −2224 | 171 |
| — | −149 | −500 | 233 | 43 | −381 | 399 | 106 | −626 | 210 | −466 | −720 | 275 | 394 | 45 | 96 | 359 | 117 | −369 | −294 | −249 | |
| — | −16 | −7108 | −8150 | −894 | −1115 | −701 | −1378 | * | * | | | | | | | | | | | | |
| 166(N) | −1021 | −2427 | 1806 | 133 | −2870 | −1499 | −635 | −2647 | −521 | −2640 | −1825 | 2171 | −1874 | −255 | −1124 | −860 | 2122 | −2184 | −2853 | −2090 | 172 |
| — | −149 | −500 | 233 | 43 | −381 | 399 | 106 | −626 | 210 | −466 | −720 | 275 | 394 | 45 | 96 | 359 | 117 | −369 | −294 | −249 | |
| — | −16 | −7108 | −8150 | −894 | −1115 | −701 | −1378 | * | * | | | | | | | | | | | | |
| 167(I) | −1830 | −1390 | −4327 | −3873 | −1210 | −3994 | −3274 | 2967 | −3678 | 1259 | −30 | −3633 | −3730 | −3283 | −3604 | −3249 | −1791 | 1570 | −2661 | −2417 | 173 |
| — | −149 | −500 | 233 | 43 | −381 | 399 | 106 | −626 | 210 | −466 | −720 | 275 | 394 | 45 | 96 | 359 | 117 | −369 | −294 | −249 | |
| — | −16 | −7108 | −8150 | −894 | −1115 | −701 | −1378 | * | * | | | | | | | | | | | | |
| 168(V) | −1771 | −1603 | −3750 | −3689 | −2037 | −3050 | −3231 | 403 | −3479 | −1154 | −1076 | −3246 | −3399 | −3383 | −3437 | −2628 | −1917 | 3536 | −3074 | −2677 | 174 |
| — | −149 | −500 | 233 | 43 | −381 | 399 | 106 | −626 | 210 | −466 | −720 | 275 | 394 | 45 | 96 | 359 | 117 | −369 | −294 | −249 | |
| — | −16 | −7108 | −8150 | −894 | −1115 | −701 | −1378 | * | * | | | | | | | | | | | | |
| 169(S) | −897 | −1462 | −2333 | −2543 | −3185 | −1640 | −2474 | −3294 | −2686 | −3497 | −2780 | −1973 | −2360 | −2483 | −2703 | 3465 | −1316 | −2413 | −3310 | −3025 | 175 |
| — | −149 | −500 | 233 | 43 | −381 | 399 | 106 | −626 | 210 | −466 | −720 | 275 | 394 | 45 | 96 | 359 | 117 | −369 | −294 | −249 | |
| — | −16 | −7108 | −8150 | −894 | −1115 | −701 | −1378 | * | * | | | | | | | | | | | | |
| 170(A) | 2440 | −824 | −2371 | −2082 | −1993 | −1344 | −1704 | −1264 | −1899 | −1832 | −1137 | −1517 | −1946 | −1674 | −2005 | 1075 | −641 | 1474 | −2390 | −2055 | 176 |
| — | −149 | −500 | 233 | 43 | −381 | 399 | 106 | −626 | 210 | −466 | −720 | 275 | 394 | 45 | 96 | 359 | 117 | −369 | −294 | −249 | |
| — | −16 | −7108 | −8150 | −894 | −1115 | −701 | −1378 | * | * | | | | | | | | | | | | |
| 171(F) | −3342 | −2776 | −4026 | −4232 | 4354 | −3545 | −1431 | −2315 | −4038 | −1801 | −1900 | −3299 | −3780 | −3350 | −3645 | −3490 | −3420 | −2566 | −739 | 349 | 177 |
| — | −149 | −500 | 233 | 43 | −381 | 399 | 106 | −626 | 210 | −466 | −720 | 275 | 394 | 45 | 96 | 359 | 117 | −369 | −294 | −249 | |
| — | −16 | −7108 | −8150 | −894 | −1115 | −701 | −1378 | * | * | | | | | | | | | | | | |
| 172(E) | −2641 | −3308 | −896 | 3732 | −3966 | −2458 | −2043 | −4105 | −2128 | −4016 | −3555 | −1531 | −2959 | −1842 | −2560 | −2479 | −2750 | −3722 | −3563 | −3385 | 178 |
| — | −149 | −500 | 233 | 43 | −381 | 399 | 106 | −626 | 210 | −466 | −720 | 275 | 394 | 45 | 96 | 359 | 117 | −369 | −294 | −249 | |
| — | −16 | −7108 | −8150 | −894 | −1115 | −701 | −1378 | * | * | | | | | | | | | | | | |
| 173(A) | 2966 | −1031 | −2429 | −2551 | −3222 | 1544 | −2368 | −2934 | −2633 | −3225 | −2377 | −1727 | −2028 | −2309 | −2637 | −656 | −850 | −1980 | −3412 | −3224 | 179 |
| — | −149 | −500 | 233 | 43 | −381 | 399 | 106 | −626 | 210 | −466 | −720 | 275 | 394 | 45 | 96 | 359 | 117 | −369 | −294 | −249 | |
| — | −16 | −7108 | −8150 | −894 | −1115 | −701 | −1378 | * | * | | | | | | | | | | | | |
| 174(V) | −1769 | −1342 | −4255 | −3793 | −1216 | −3901 | −3162 | 1633 | −3589 | 1486 | −51 | −3537 | −3667 | −3214 | −3518 | −3143 | −1731 | 2692 | −2609 | −2345 | 180 |
| — | −149 | −500 | 233 | 43 | −381 | 399 | 106 | −626 | 210 | −466 | −720 | 275 | 394 | 45 | 96 | 359 | 117 | −369 | −294 | −249 | |
| — | −16 | −7108 | −8150 | −894 | −1115 | −701 | −1378 | * | * | | | | | | | | | | | | |
| 175(G) | −2594 | −2690 | −3304 | −3623 | −4328 | 3747 | −3462 | −4761 | −3953 | −4671 | −4212 | −3320 | −3352 | −3748 | −3779 | −2839 | −2981 | −4004 | −3668 | −4222 | 181 |
| — | −149 | −500 | 233 | 43 | −381 | 399 | 106 | −626 | 210 | −466 | −720 | 275 | 394 | 45 | 96 | 359 | 117 | −369 | −294 | −249 | |
| — | −16 | −7108 | −8150 | −894 | −1115 | −701 | −1378 | * | * | | | | | | | | | | | | |
| 176(Q) | −729 | −2116 | −413 | 1096 | −2484 | −1587 | 1599 | −2186 | 1695 | −2094 | −1219 | −223 | −1698 | 2418 | 90 | −599 | −649 | −1770 | −2213 | −1615 | 182 |
| — | −149 | −500 | 233 | 43 | −381 | 399 | 106 | −626 | 210 | −466 | −720 | 275 | 394 | 45 | 96 | 359 | 117 | −369 | −294 | −249 | |
| — | −16 | −7108 | −8150 | −894 | −1115 | −701 | −1378 | * | * | | | | | | | | | | | | |
| 177(W) | −1652 | −1707 | −2340 | −1879 | 1996 | −2733 | 2013 | −1398 | 1758 | −1386 | −938 | −1641 | −2751 | −1364 | −1762 | −1780 | −1577 | −1325 | 3577 | 2136 | 183 |
| — | −149 | −500 | 233 | 43 | −381 | 399 | 106 | −626 | 210 | −466 | −720 | 275 | 394 | 45 | 96 | 359 | 117 | −369 | −294 | −249 | |
| — | −16 | −7108 | −8150 | −894 | −1115 | −701 | −1378 | * | * | | | | | | | | | | | | |
| 178(T) | −421 | −753 | −1251 | −704 | −846 | −1670 | −535 | 894 | −548 | −690 | −1 | 1376 | −1791 | −421 | −846 | 373 | 1461 | 858 | −1236 | −812 | 184 |
| — | −149 | −500 | 233 | 43 | −381 | 399 | 106 | −626 | 210 | −466 | −720 | 275 | 394 | 45 | 96 | 359 | 117 | −369 | −294 | −249 | |
| — | −16 | −7108 | −8150 | −894 | −1115 | −701 | −1378 | * | * | | | | | | | | | | | | |
| 179(H) | 1498 | −1593 | −504 | 15 | −1895 | −1484 | 2279 | −1559 | 1119 | −1640 | −810 | −242 | −1611 | 194 | −171 | −462 | 815 | −1231 | −1914 | −1340 | 185 |
| — | −149 | −500 | 233 | 43 | −381 | 399 | 106 | −626 | 210 | −466 | −720 | 275 | 394 | 45 | 96 | 359 | 117 | −369 | −294 | −249 | |
| — | −16 | −7108 | −8150 | −894 | −1115 | −701 | −1378 | * | * | | | | | | | | | | | | |
| 180(G) | −1515 | −2130 | −1298 | −1450 | −2658 | 3285 | 2212 | −3276 | −1691 | −3291 | −2638 | −1524 | −2562 | −1662 | −1925 | −1600 | −1764 | −2713 | −2804 | −2234 | 186 |
| — | −149 | −500 | 233 | 43 | −381 | 399 | 106 | −626 | 210 | −466 | −720 | 275 | 394 | 45 | 96 | 359 | 117 | −369 | −294 | −249 | |
| — | −16 | −7108 | −8150 | −894 | −1115 | −701 | −1378 | * | * | | | | | | | | | | | | |
| 181(K) | −528 | −2010 | 1346 | 1082 | −2329 | −1408 | −118 | −2080 | 1475 | −2018 | −1108 | 1161 | −1543 | 331 | 1052 | −394 | −471 | −1632 | −2181 | −1494 | 187 |
| — | −149 | −500 | 233 | 43 | −381 | 399 | 106 | −626 | 210 | −466 | −720 | 275 | 394 | 45 | 96 | 359 | 117 | −369 | −294 | −249 | |
| — | −16 | −7108 | −8150 | −894 | −1115 | −701 | −1378 | * | * | | | | | | | | | | | | |
| 182(M) | −1894 | −1521 | −4170 | −3679 | −840 | −3793 | −2866 | 2827 | −3360 | 375 | 3445 | −3437 | −3555 | −2902 | −3223 | −3028 | −1846 | 470 | −2249 | −2059 | 188 |
| — | −149 | −500 | 233 | 43 | −381 | 399 | 106 | −626 | 210 | −466 | −720 | 275 | 394 | 45 | 96 | 359 | 117 | −369 | −294 | −249 | |
| — | −16 | −7108 | −8150 | −894 | −1115 | −701 | −1378 | * | * | | | | | | | | | | | | |
| 183(T) | −670 | −1758 | 1731 | −141 | −2591 | −1399 | −691 | −2319 | −499 | −2384 | −1543 | −387 | −1786 | −316 | −1016 | 1576 | 2044 | −1811 | −2624 | −1981 | 189 |
| — | −149 | −500 | 233 | 43 | −381 | 399 | 106 | −626 | 210 | −466 | −720 | 275 | 394 | 45 | 96 | 359 | 117 | −369 | −294 | −249 | |
| — | −16 | −7108 | −8150 | −894 | −1115 | −701 | −1378 | * | * | | | | | | | | | | | | |
| 184(E) | 345 | −2074 | 925 | 1994 | −2378 | −1408 | −177 | −2135 | 922 | −2084 | −1183 | −38 | 641 | 264 | −356 | −444 | −536 | −1690 | −2261 | −1556 | 190 |
| — | −149 | −500 | 233 | 43 | −381 | 399 | 106 | −626 | 210 | −466 | −720 | 275 | 394 | 45 | 96 | 359 | 117 | −369 | −294 | −249 | |
| — | −16 | −7108 | −8150 | −894 | −1115 | −701 | −1378 | * | * | | | | | | | | | | | | |
| 185(E) | −1493 | −2900 | 93 | 3174 | −2903 | −1743 | 1987 | −3042 | −646 | −2957 | −2238 | −411 | −2146 | −506 | −1121 | −1272 | −1503 | −2629 | −2905 | −2134 | 191 |
| — | −149 | −500 | 233 | 43 | −381 | 399 | 106 | −626 | 210 | −466 | −720 | 275 | 394 | 45 | 96 | 359 | 117 | −369 | −294 | −249 | |
| — | −16 | −7108 | −8150 | −894 | −1115 | −701 | −1378 | * | * | | | | | | | | | | | | |
| 186(D) | −1293 | −2959 | 2673 | 2121 | −3219 | −1546 | −713 | −3043 | −707 | −2974 | −2191 | −158 | −1967 | −342 | −1394 | −1043 | 701 | −2567 | −3172 | −2311 | 192 |
| — | −149 | −500 | 233 | 43 | −381 | 399 | 106 | −626 | 210 | −466 | −720 | 275 | 394 | 45 | 96 | 359 | 117 | −369 | −294 | −249 | |
| — | −16 | −7108 | −8150 | −894 | −1115 | −701 | −1378 | * | * | | | | | | | | | | | | |
| 187(F) | −1137 | −905 | −3250 | −2707 | 2365 | −2647 | −1016 | −34 | −2336 | 1239 | 267 | −2150 | −2626 | −1861 | −2133 | −1752 | −1069 | 1461 | −599 | 1844 | 193 |
| — | −149 | −500 | 233 | 43 | −381 | 399 | 106 | −626 | 210 | −466 | −720 | 275 | 394 | 45 | 96 | 359 | 117 | −369 | −294 | −249 | |
| — | −16 | −7108 | −8150 | −894 | −1115 | −701 | −1378 | * | * | | | | | | | | | | | | |
| 188(K) | −479 | −1713 | −409 | 1031 | −1925 | −1467 | 1755 | −1650 | 1844 | −349 | −827 | −140 | −1556 | 319 | −75 | 403 | −411 | −1301 | −1900 | 843 | 194 |
| — | −149 | −500 | 233 | 43 | −381 | 399 | 106 | −626 | 210 | −466 | −720 | 275 | 394 | 45 | 96 | 359 | 117 | −369 | −294 | −249 | |
| — | −16 | −7108 | −8150 | −894 | −1115 | −701 | −1378 | * | * | | | | | | | | | | | | |
| 189(G) | 433 | −2144 | 52 | 1047 | −2717 | 2303 | −615 | −2467 | −442 | −2482 | −1655 | 1123 | −1828 | −233 | −995 | −763 | −923 | −2000 | −2710 | −2005 | 195 |
| — | −149 | −500 | 233 | 43 | −381 | 399 | 106 | −626 | 210 | −466 | −720 | 275 | 394 | 45 | 96 | 359 | 117 | −369 | −294 | −249 | |
| — | −16 | −7108 | −8150 | −894 | −1115 | −701 | −1378 | * | * | | | | | | | | | | | | |
| 190(V) | −1752 | −1320 | −4254 | −3806 | −1311 | −3916 | −3232 | 1701 | −3614 | 1188 | −140 | −3551 | −3693 | −3280 | −3568 | −3166 | −1718 | 2833 | −2703 | −2409 | 196 |
| — | −149 | −500 | 233 | 43 | −381 | 399 | 106 | −626 | 210 | −466 | −720 | 275 | 394 | 45 | 96 | 359 | 117 | −369 | −294 | −249 | |
| — | −16 | −7108 | −8150 | −894 | −1115 | −701 | −1378 | * | * | | | | | | | | | | | | |
| 191(E) | −1199 | −1750 | −734 | 2668 | −1820 | −2038 | −1068 | 1892 | −867 | −1273 | −897 | −922 | −2295 | −797 | −1238 | −1340 | −1197 | −426 | −2325 | −1789 | 197 |
| — | −149 | −500 | 233 | 43 | −381 | 399 | 106 | −626 | 210 | −466 | −720 | 275 | 394 | 45 | 96 | 359 | 117 | −369 | −294 | −249 | |
| — | −16 | −7108 | −8150 | −894 | −1115 | −701 | −1378 | * | * | | | | | | | | | | | | |
| 192(C) | −1182 | 3528 | −1398 | −620 | −2541 | −2038 | −358 | −2093 | 1181 | −2037 | −1272 | −747 | −2070 | 1553 | 2213 | −1123 | −1038 | −1817 | −2142 | −1774 | 198 |
| — | −149 | −500 | 233 | 43 | −381 | 399 | 106 | −626 | 210 | −466 | −720 | 275 | 394 | 45 | 96 | 359 | 117 | −369 | −294 | −249 | |
| — | −16 | −7108 | −8150 | −894 | −1115 | −701 | −1378 | * | * | | | | | | | | | | | | |
| 193(N) | −1478 | −2527 | −261 | −403 | −2011 | −1837 | 2032 | −2925 | −735 | −2845 | −2195 | 3635 | −2259 | −721 | −1085 | −1352 | −1546 | −2522 | −2307 | −1431 | 199 |
| — | −149 | −500 | 233 | 43 | −381 | 399 | 106 | −626 | 210 | −466 | −720 | 275 | 394 | 45 | 96 | 359 | 117 | −369 | −294 | −249 | |
| — | −16 | −7108 | −8150 | −894 | −1115 | −701 | −1378 | * | * | | | | | | | | | | | | |
| 194(A) | 3438 | −1472 | −2846 | −3040 | −3287 | −1726 | −2735 | −2840 | −3028 | −3257 | −2662 | −2236 | −2447 | −2798 | −2944 | −1216 | −1387 | −2183 | −3405 | −3320 | 200 |
| — | −149 | −500 | 233 | 43 | −381 | 399 | 106 | −626 | 210 | −466 | −720 | 275 | 394 | 45 | 96 | 359 | 117 | −369 | −294 | −249 | |
| — | −16 | −7108 | −8150 | −894 | −1115 | −701 | −1378 | * | * | | | | | | | | | | | | |
| 195(C) | −1220 | 4911 | −3609 | −3314 | −1440 | −2525 | −2482 | 1565 | −2922 | −706 | −544 | −2678 | −2896 | −2710 | −2836 | −1869 | −1375 | 379 | −2371 | −1957 | 201 |
| — | −149 | −500 | 233 | 43 | −381 | 399 | 106 | −626 | 210 | −466 | −720 | 275 | 394 | 45 | 96 | 359 | 117 | −369 | −294 | −249 | |
| — | −16 | −7108 | −8150 | −894 | −1115 | −701 | −1378 | * | * | | | | | | | | | | | | |
| 196(P) | −2931 | −2878 | −3420 | −3706 | −4181 | −2925 | −3468 | −4621 | −3859 | −4490 | −4165 | −3491 | 4225 | −3781 | −3695 | −3182 | −3279 | −4087 | −3594 | −4064 | 202 |
| — | −149 | −500 | 233 | 43 | −381 | 399 | 106 | −626 | 210 | −466 | −720 | 275 | 394 | 45 | 96 | 359 | 117 | −369 | −294 | −249 | |
| — | −16 | −7108 | −8150 | −894 | −1115 | −701 | −1378 | * | * | | | | | | | | | | | | |
| 197(G) | −477 | −1115 | −1983 | −2189 | −3315 | 3154 | −2272 | −3172 | −2506 | −3387 | −2522 | −1599 | −2042 | −2177 | −2583 | 1217 | −905 | −2130 | −3477 | −3225 | 203 |
| — | −149 | −500 | 233 | 43 | −381 | 399 | 106 | −626 | 210 | −466 | −720 | 275 | 394 | 45 | 96 | 359 | 117 | −369 | −294 | −249 | |
| — | −16 | −7108 | −8150 | −894 | −1115 | −701 | −1378 | * | * | | | | | | | | | | | | |
| 198(A) | 1653 | −1347 | −705 | −249 | −1969 | −1385 | −477 | −1629 | −159 | −1759 | −935 | −434 | 1285 | 1404 | −585 | −450 | 1019 | −1243 | −2070 | −1522 | 204 |
| — | −149 | −500 | 233 | 43 | −381 | 399 | 106 | −626 | 210 | −466 | −720 | 275 | 394 | 45 | 96 | 359 | 117 | −369 | −294 | −249 | |
| — | −16 | −7108 | −8150 | −894 | −1115 | −701 | −1378 | * | * | | | | | | | | | | | | |
| 199(G) | −2594 | −2690 | −3304 | −3623 | −4328 | 3747 | −3462 | −4761 | −3953 | −4671 | −4212 | −3320 | −3352 | −3748 | −3779 | −2839 | −2981 | −4004 | −3668 | −4222 | 205 |
| — | −149 | −500 | 233 | 43 | −381 | 399 | 106 | −626 | 210 | −466 | −720 | 275 | 394 | 45 | 96 | 359 | 117 | −369 | −294 | −249 | |
| — | −16 | −7108 | −8150 | −894 | −1115 | −701 | −1378 | * | * | | | | | | | | | | | | |
| 200(S) | 1870 | −938 | −2270 | −2183 | −3068 | 1488 | −2056 | −2810 | −2168 | −3032 | −2144 | −1511 | −1898 | −1901 | −2300 | 2236 | −690 | −1857 | −3265 | −2990 | 206 |
| — | −149 | −500 | 233 | 43 | −381 | 399 | 106 | −626 | 210 | −466 | −720 | 275 | 394 | 45 | 96 | 359 | 117 | −369 | −294 | −249 | |
| — | −16 | −7108 | −8150 | −894 | −1115 | −701 | −1378 | * | * | | | | | | | | | | | | |
| 201(C) | −2476 | 5735 | −4102 | −4358 | −3712 | −2763 | −3545 | −3518 | −4167 | −3859 | −3569 | −3631 | −3363 | −4030 | −3832 | −2793 | −2860 | −3158 | −3464 | −3718 | 207 |
| — | −149 | −500 | 233 | 43 | −381 | 399 | 106 | −626 | 210 | −466 | −720 | 275 | 394 | 45 | 96 | 359 | 117 | −369 | −294 | −249 | |
| — | −16 | −7108 | −8150 | −894 | −1115 | −701 | −1378 | * | * | | | | | | | | | | | | |
| 202(G) | −2594 | −2690 | −3304 | −3623 | −4328 | 3747 | −3462 | −4761 | −3953 | −4671 | −4212 | −3320 | −3352 | −3748 | −3779 | −2839 | −2981 | −4004 | −3668 | 4222 | 208 |
| — | −149 | −500 | 233 | 43 | −381 | 399 | 106 | −626 | 210 | −466 | −720 | 275 | 394 | 45 | 96 | 359 | 117 | −369 | −294 | −249 | |
| — | −16 | −7108 | −8150 | −894 | −1115 | −701 | −1378 | * | * | | | | | | | | | | | | |
| 203(G) | −2594 | −2690 | −3304 | −3623 | −4328 | 3747 | −3462 | −4761 | −3953 | −4671 | −4212 | −3320 | −3352 | −3748 | −3779 | −2839 | −2981 | −4004 | −3658 | −4222 | 209 |
| — | −149 | −500 | 233 | 43 | −381 | 399 | 106 | −626 | 210 | −466 | −720 | 275 | 394 | 45 | 96 | 359 | 117 | −369 | −294 | −249 | |
| — | −16 | −7108 | −8150 | −894 | −1115 | −701 | −1378 | * | * | | | | | | | | | | | | |
| 204(M) | −2406 | −2296 | −3638 | −3594 | −1525 | −3105 | −2824 | −1047 | −3121 | −596 | 5043 | −3293 | −3425 | −3046 | −2996 | −2911 | −2552 | −1398 | −2513 | −2207 | 210 |
| — | −149 | −500 | 233 | 43 | −381 | 399 | 106 | −626 | 210 | −466 | −720 | 275 | 394 | 45 | 96 | 359 | 117 | −369 | −294 | −249 | |
| — | −16 | −7108 | −8150 | −894 | −1115 | −701 | −1378 | * | * | | | | | | | | | | | | |
| 205(Y) | −3590 | −2700 | −4146 | −4379 | 2092 | −4028 | −404 | −2517 | −3963 | −1928 | −1973 | −2744 | −3921 | −2845 | −3431 | −3284 | −3474 | −2669 | 336 | 4423 | 211 |
| — | −149 | −500 | 233 | 43 | −381 | 399 | 106 | −626 | 210 | −466 | −720 | 275 | 394 | 45 | 96 | 359 | 117 | −369 | −294 | −249 | |
| — | −16 | −7108 | −8150 | −894 | −1115 | −701 | −1378 | * | * | | | | | | | | | | | | |
| 206(T) | −1213 | −1674 | −2755 | −2906 | −3163 | −1922 | −2659 | −2698 | −2788 | −3105 | −2612 | −2311 | −2600 | −2708 | −2753 | −1463 | 3819 | −2197 | −3286 | −3156 | 212 |
| — | −149 | −500 | 233 | 43 | −381 | 399 | 106 | −626 | 210 | −466 | −720 | 275 | 394 | 45 | 96 | 359 | 117 | −369 | −294 | −249 | |
| — | −16 | −7108 | −8150 | −894 | −1115 | −701 | −1378 | * | * | | | | | | | | | | | | |
| 207(A) | 3438 | −1472 | −2846 | −3040 | −3287 | −1726 | −2735 | −2840 | −3028 | −3257 | −2662 | −2236 | −2447 | −2798 | −2944 | −1216 | −1387 | −2183 | −3405 | −3320 | 213 |
| — | −149 | −500 | 233 | 43 | −381 | 399 | 106 | −626 | 210 | −466 | −720 | 275 | 394 | 45 | 96 | 359 | 117 | −369 | −294 | −249 | |
| — | −16 | −7108 | −8150 | −894 | −1115 | −701 | −1378 | * | * | | | | | | | | | | | | |
| 208(N) | −2171 | −2655 | −1458 | −1748 | −3334 | −2364 | −2267 | −3943 | −2365 | −3936 | −3437 | 4205 | −2932 | −2205 | −2608 | −2224 | −2439 | −3392 | −3253 | −2909 | 214 |
| — | −149 | −500 | 233 | 43 | −381 | 399 | 106 | −626 | 210 | −466 | −720 | 275 | 394 | 45 | 96 | 359 | 117 | −369 | −294 | −249 | |
| — | −16 | −7108 | −8150 | −894 | −1115 | −701 | −1378 | * | * | | | | | | | | | | | | |
| 209(T) | −1213 | −1674 | −2755 | −2906 | −3163 | −1922 | −2659 | −2698 | −2788 | −3105 | −2612 | −2311 | −2600 | −2708 | −2753 | −1463 | 3819 | −2197 | −3286 | −3156 | 215 |
| — | −149 | −500 | 233 | 43 | −381 | 399 | 106 | −626 | 210 | −466 | −720 | 275 | 394 | 45 | 96 | 359 | 117 | −369 | −294 | −249 | |
| — | −16 | −7108 | −8150 | −894 | −1115 | −701 | −1378 | * | * | | | | | | | | | | | | |
| 210(M) | −2355 | −1988 | −4343 | −3834 | −504 | −4051 | −2868 | 105 | −3385 | 1451 | 4460 | −3680 | −3671 | −2806 | −3171 | −3327 | −2274 | −474 | −2039 | −1925 | 216 |
| — | −149 | −500 | 233 | 43 | −381 | 399 | 106 | −626 | 210 | −466 | −720 | 275 | 394 | 45 | 96 | 359 | 117 | −369 | −294 | −249 | |
| — | −16 | −7108 | −8150 | −894 | −1115 | −701 | −1378 | * | * | | | | | | | | | | | | |
| 211(S) | 2150 | −939 | −2407 | −2415 | −3075 | −1197 | −2205 | −2781 | −2384 | −3065 | −2205 | −1613 | −1936 | −2105 | −2436 | 2652 | −729 | −1850 | −3306 | −3049 | 217 |
| — | −149 | −500 | 233 | 43 | −381 | 399 | 106 | −626 | 210 | −466 | −720 | 275 | 394 | 45 | 96 | 359 | 117 | −369 | −294 | −249 | |
| — | −16 | −7108 | −8150 | −894 | −1115 | −701 | −1378 | * | * | | | | | | | | | | | | |
| 212(S) | −344 | −979 | −2190 | −2162 | −2959 | −1227 | −2042 | −2651 | −2116 | −2934 | −2100 | −1526 | −1941 | −1909 | −2222 | 2940 | 1775 | −1804 | −3187 | −2882 | 218 |
| — | −149 | −500 | 233 | 43 | −381 | 399 | 106 | −626 | 210 | −466 | −720 | 275 | 394 | 45 | 96 | 359 | 117 | −369 | −294 | −249 | |
| — | −16 | −7108 | −8150 | −894 | −1115 | −701 | −1378 | * | * | | | | | | | | | | | | |
| 213(A) | 3048 | −932 | −2480 | −2533 | −3075 | −1200 | −2274 | −2765 | −2501 | −3071 | −2221 | −1658 | −1948 | −2205 | −2512 | 1225 | −739 | −1842 | −3322 | −3078 | 219 |
| — | −149 | −500 | 233 | 43 | −381 | 399 | 106 | −626 | 210 | −466 | −720 | 275 | 394 | 45 | 96 | 359 | 117 | −369 | −294 | −249 | |
| — | −16 | −7108 | −8150 | −894 | −1115 | −701 | −1378 | * | * | | | | | | | | | | | | |
| 214(I) | −1924 | −1546 | −4067 | −3658 | 2312 | −3663 | −2081 | 3030 | −3367 | 150 | 99 | −3197 | −3492 | −2821 | −3179 | −2894 | −1877 | 293 | −1445 | −692 | 220 |
| — | −149 | −500 | 233 | 43 | −381 | 399 | 106 | −626 | 210 | −466 | −720 | 275 | 394 | 45 | 96 | 359 | 117 | −369 | −294 | −249 | |
| — | −16 | −7108 | −8150 | −894 | −1115 | −701 | −1378 | * | * | | | | | | | | | | | | |
| 215(E) | −2641 | −3308 | −896 | 3732 | −3966 | −2458 | −2043 | −4105 | −2128 | −4016 | −3555 | −1531 | −2959 | −1842 | −2560 | −2479 | −2750 | −3722 | −3563 | −3385 | 221 |
| — | −149 | −500 | 233 | 43 | −381 | 399 | 106 | −626 | 210 | −466 | −720 | 275 | 394 | 45 | 96 | 359 | 117 | −369 | −294 | −249 | |
| — | −16 | −7108 | −8150 | −894 | −1115 | −701 | −1378 | * | * | | | | | | | | | | | | |
| 216(A) | 2389 | −814 | −2506 | −2162 | −1696 | −1545 | −1698 | −499 | −1942 | −1398 | −813 | −1640 | −2076 | −1723 | −2027 | −806 | 1148 | 1559 | −2200 | −1856 | 222 |
| — | −149 | −500 | 233 | 43 | −381 | 399 | 106 | −626 | 210 | −466 | −720 | 275 | 394 | 45 | 96 | 359 | 117 | −369 | −294 | −249 | |
| — | −16 | −7108 | −8150 | −894 | −1115 | −701 | −1378 | * | * | | | | | | | | | | | | |
| 217(M) | −2576 | −2118 | −4725 | −4165 | −461 | −4430 | −3165 | 99 | −3811 | 2513 | 3454 | −4075 | −3839 | −2978 | −3488 | −3704 | −2457 | −591 | −2111 | −2145 | 223 |
| — | −149 | −500 | 233 | 43 | −381 | 399 | 106 | −626 | 210 | −466 | −720 | 275 | 394 | 45 | 96 | 359 | 117 | −369 | −294 | −249 | |
| — | −16 | −7108 | −8150 | −894 | −1115 | −701 | −1378 | * | * | | | | | | | | | | | | |
| 218(G) | −2594 | −2690 | −3304 | −3623 | −4328 | 3747 | −3462 | −4761 | −3953 | −4671 | −4212 | −3320 | −3352 | −3748 | −3779 | −2839 | −2981 | −4004 | −3668 | −4222 | 224 |
| — | −149 | −500 | 233 | 43 | −381 | 399 | 106 | −626 | 210 | −466 | −720 | 275 | 394 | 45 | 96 | 359 | 117 | −369 | −294 | −249 | |
| — | −16 | −7108 | −8150 | −894 | −1115 | −701 | −1378 | * | * | | | | | | | | | | | | |
| 219(M) | −2313 | −1968 | −4258 | −3765 | −518 | −3966 | −2806 | 98 | −3289 | 1292 | 4523 | −3599 | −3636 | −2769 | −3097 | −3249 | −2243 | −457 | −2026 | −1874 | 225 |
| — | −149 | −500 | 233 | 43 | −381 | 399 | 106 | −626 | 210 | −466 | −720 | 275 | 394 | 45 | 96 | 359 | 117 | −369 | −294 | −249 | |
| — | −16 | −7108 | −8150 | −894 | −1115 | −701 | −1378 | * | * | | | | | | | | | | | | |
| 220(S) | −897 | −1462 | −2333 | −2543 | −3185 | −1540 | −2474 | −3294 | −2686 | −3497 | −2780 | −1973 | −2360 | −2483 | −2703 | 3455 | −1316 | −2413 | −3310 | −3025 | 226 |
| — | −149 | −500 | 233 | 43 | −381 | 399 | 106 | −626 | 210 | −466 | −720 | 275 | 394 | 45 | 96 | 359 | 117 | −369 | −294 | −249 | |
| — | −16 | −7108 | −8150 | −894 | −1115 | −701 | −1378 | * | * | | | | | | | | | | | | |
| 221(L) | −2631 | −2159 | −4786 | −4228 | −462 | −4506 | −3231 | 96 | −3878 | 2828 | 2482 | −4157 | −3880 | −3016 | −3541 | −3793 | −2509 | −608 | −2134 | −2182 | 227 |
| — | −149 | −500 | 233 | 43 | −381 | 399 | 106 | −626 | 210 | −466 | −720 | 275 | 394 | 45 | 96 | 359 | 117 | −369 | −294 | −249 | |
| — | −16 | −7108 | −8150 | −894 | −1115 | −701 | −1378 | * | * | | | | | | | | | | | | |
| 222(P) | −1501 | −1778 | −2473 | −2371 | −1710 | −2311 | −2045 | −1321 | −2060 | 827 | −1068 | −2173 | 3594 | −2082 | −2130 | −1799 | −1699 | −1373 | −2373 | −1942 | 228 |
| — | −149 | −500 | 233 | 43 | −381 | 399 | 106 | −626 | 210 | −466 | −720 | 275 | 394 | 45 | 96 | 359 | 117 | −369 | −294 | −249 | |
| — | −16 | −7108 | −8150 | −894 | −1115 | −701 | −1378 | * | * | | | | | | | | | | | | |
| 223(Y) | −1068 | −1670 | −865 | −836 | −631 | 1198 | −767 | −1828 | −1059 | −1914 | −1304 | 692 | −2203 | −906 | −1387 | −1136 | −1163 | −1566 | −1185 | 3670 | 229 |
| — | −149 | −500 | 233 | 43 | −381 | 399 | 106 | −626 | 210 | −466 | −720 | 275 | 394 | 45 | 96 | 359 | 117 | −369 | −294 | −249 | |
| — | −16 | −7108 | −8150 | −894 | −1115 | −701 | −1378 | * | * | | | | | | | | | | | | |
| 224(S) | −897 | −1462 | −2333 | −2543 | −3185 | −1640 | −2474 | −3294 | −2686 | −3497 | −2780 | −1973 | −2360 | −2483 | −2703 | 3465 | −1316 | −2413 | −3310 | −3025 | 230 |
| — | −149 | −500 | 233 | 43 | −381 | 399 | 106 | −626 | 210 | −466 | −720 | 275 | 394 | 45 | 96 | 359 | 117 | −369 | −294 | −249 | |
| — | −16 | −7108 | −8150 | −894 | −1115 | −701 | −1378 | * | * | | | | | | | | | | | | |
| 225(S) | 1172 | −954 | −2367 | −2422 | −3120 | −1204 | −2237 | −2835 | −2426 | −3122 | −2265 | −1621 | −1948 | −2145 | −2467 | 3107 | −749 | −1884 | −3349 | −3092 | 231 |
| — | −149 | −500 | 233 | 43 | −381 | 399 | 106 | −626 | 210 | −466 | −720 | 275 | 394 | 45 | 96 | 359 | 117 | −369 | −294 | −249 | |
| — | −16 | −7108 | −8150 | −894 | −1115 | −701 | −1378 | * | * | | | | | | | | | | | | |
| 226(S) | −342 | −975 | −2176 | −2124 | −2912 | −1229 | −2003 | −2594 | −2067 | −2878 | −2048 | −1510 | −1936 | −1866 | −2184 | 2553 | 2492 | −1773 | −3143 | −2833 | 232 |
| — | −149 | −500 | 233 | 43 | −381 | 399 | 106 | −626 | 210 | −466 | −720 | 275 | 394 | 45 | 96 | 359 | 117 | −369 | −294 | −249 | |
| — | −16 | −7108 | −8150 | −894 | −1115 | −701 | −1378 | * | * | | | | | | | | | | | | |
| 227(M) | −720 | −1440 | −710 | −343 | −1228 | −1693 | 2436 | −1209 | −132 | −1364 | 3099 | 1904 | −1852 | −183 | −458 | −776 | −680 | −1004 | −1540 | −890 | 233 |
| — | −149 | −500 | 233 | 43 | −381 | 399 | 106 | −626 | 210 | −466 | −720 | 275 | 394 | 45 | 96 | 359 | 117 | −369 | −294 | −249 | |
| — | −16 | −7108 | −8150 | −894 | −1115 | −701 | −1378 | * | * | | | | | | | | | | | | |
| 228(P) | 2240 | −1100 | −2241 | −2293 | −3037 | −1346 | −2188 | −2683 | −2317 | −2986 | −2210 | −1663 | 3041 | −2093 | −2391 | −722 | −895 | −1893 | −3243 | −2998 | 234 |
| — | −149 | −500 | 233 | 43 | −381 | 399 | 106 | −626 | 210 | −466 | −720 | 275 | 394 | 45 | 96 | 359 | 117 | −369 | −294 | −249 | |
| — | −16 | −7108 | −8150 | −894 | −1115 | −701 | −1378 | * | * | | | | | | | | | | | | |
| 229(A) | 2958 | −1235 | −1299 | −1377 | −2868 | −1345 | −1673 | −2580 | −1661 | −2843 | −2054 | 1555 | −1995 | −1468 | −1921 | −715 | −888 | −1871 | −3064 | −2630 | 235 |
| — | −149 | −500 | 233 | 43 | −381 | 399 | 106 | −626 | 210 | −466 | −720 | 275 | 394 | 45 | 96 | 359 | 117 | −369 | −294 | −249 | |
| — | −16 | −7108 | −8150 | −894 | −1115 | −701 | −1378 | * | * | | | | | | | | | | | | |
| 230(E) | −509 | −1046 | −884 | 1564 | −1116 | −1669 | −441 | −485 | −283 | 250 | −206 | −577 | 689 | −200 | −656 | −670 | −459 | 1290 | −1467 | −995 | 236 |
| — | −149 | −500 | 233 | 43 | −381 | 399 | 106 | −626 | 210 | −466 | −720 | 275 | 394 | 45 | 96 | 359 | 117 | −369 | −294 | −249 | |
| — | −16 | −7108 | −8150 | −894 | −1115 | −701 | −1378 | * | * | | | | | | | | | | | | |
| 231(D) | −1203 | −2412 | 2595 | −117 | −3286 | −1536 | −1057 | −3176 | −1165 | −3186 | −2436 | −428 | −2068 | −736 | −1824 | 2377 | −1366 | −2578 | −3334 | −2552 | 237 |
| — | −149 | −500 | 233 | 43 | −381 | 399 | 106 | −626 | 210 | −466 | −720 | 275 | 394 | 45 | 96 | 359 | 117 | −369 | −294 | −249 | |
| — | −16 | −7108 | −8150 | −894 | −1115 | −701 | −1378 | * | * | | | | | | | | | | | | |
| 232(Q) | 954 | −1983 | −100 | 971 | −2337 | 177 | −267 | −2067 | 81 | −2060 | −1189 | −125 | −1637 | 2600 | −418 | −514 | −597 | −1649 | −2268 | −1597 | 238 |
| — | −149 | −500 | 233 | 43 | −381 | 399 | 106 | −626 | 210 | −466 | −720 | 275 | 394 | 45 | 96 | 359 | 117 | −369 | −294 | −249 | |
| — | −16 | −7108 | −8150 | −894 | −1115 | −701 | −1378 | * | * | | | | | | | | | | | | |
| 233(E) | −2641 | −3308 | −896 | 3732 | −3966 | −2458 | −2043 | −4105 | −2128 | −4016 | −3555 | −1531 | −2959 | −1842 | −2560 | −2479 | −2750 | −3722 | −3563 | −3385 | 239 |
| — | −149 | −500 | 233 | 43 | −381 | 399 | 106 | −626 | 210 | −466 | −720 | 275 | 394 | 45 | 96 | 359 | 117 | −369 | −294 | −249 | |
| — | −16 | −7108 | −8150 | −894 | −1115 | −701 | −1378 | * | * | | | | | | | | | | | | |
| 234(K) | −2620 | −2961 | −2461 | −2046 | −3743 | −2791 | −1570 | −3603 | 3784 | −3387 | −2839 | −2048 | −3039 | −1260 | −465 | −2604 | −2536 | −3331 | −3001 | −2988 | 240 |
| — | −149 | −500 | 233 | 43 | −381 | 399 | 106 | −626 | 210 | −466 | −720 | 275 | 394 | 45 | 96 | 359 | 117 | −369 | −294 | −249 | |
| — | −16 | −7108 | −8150 | −894 | −1115 | −701 | −1378 | * | * | | | | | | | | | | | | |
| 235(R) | 377 | −1802 | −415 | 988 | −2095 | −1474 | −95 | −1786 | 1452 | −1785 | −911 | −135 | −1560 | 343 | 1555 | −409 | −431 | 376 | −1986 | −1375 | 241 |
| — | −149 | −500 | 233 | 43 | −381 | 399 | 106 | −626 | 210 | −466 | −720 | 275 | 394 | 45 | 96 | 359 | 117 | −369 | −294 | −249 | |
| — | −16 | −7108 | −8150 | −894 | −1115 | −701 | −1378 | * | * | | | | | | | | | | | | |
| 236(D) | 1083 | −1565 | 2662 | −244 | −1941 | −1573 | −679 | 612 | −527 | −1651 | −980 | −490 | −1869 | −358 | −1003 | −771 | −766 | −903 | −2208 | −1633 | 242 |
| — | −149 | −500 | 233 | 43 | −381 | 399 | 106 | −626 | 210 | −466 | −720 | 275 | 394 | 45 | 96 | 359 | 117 | −369 | −294 | −249 | |
| — | −16 | −7108 | −8150 | −894 | −1115 | −701 | −1378 | * | * | | | | | | | | | | | | |
| 237(E) | −1225 | −2868 | 1894 | 1948 | −3149 | −1532 | −671 | −2975 | −630 | −2902 | −2101 | −150 | −1935 | −293 | −1299 | 1884 | −1241 | −2496 | −3093 | −2248 | 243 |
| — | −149 | −500 | 233 | 43 | −381 | 399 | 106 | −626 | 210 | −466 | −720 | 275 | 394 | 45 | 96 | 359 | 117 | −369 | −294 | −249 | |
| — | −16 | −7108 | −8150 | −894 | −1115 | −701 | −1378 | * | * | | | | | | | | | | | | |
| 238(C) | 1375 | 3262 | −2620 | −2108 | −827 | −1866 | −1267 | 1631 | −1811 | −599 | −10 | −1674 | −2137 | −1531 | −1786 | −1034 | 790 | 249 | −1361 | −1010 | 244 |
| — | −149 | −500 | 233 | 43 | −381 | 399 | 106 | −626 | 210 | −466 | −720 | 275 | 394 | 45 | 96 | 359 | 117 | −369 | −294 | −249 | |
| — | −16 | −7108 | −8150 | −894 | −1115 | −701 | −1378 | * | * | | | | | | | | | | | | |
| 239(E) | 635 | −1796 | 1055 | 1761 | −2018 | −1464 | −263 | 1191 | 28 | −1767 | −946 | −148 | −1637 | 135 | −481 | −520 | −553 | −1300 | −2077 | −1441 | 245 |
| — | −149 | −500 | 233 | 43 | −381 | 399 | 106 | −626 | 210 | −466 | −720 | 275 | 394 | 45 | 96 | 359 | 117 | −369 | −294 | −249 | |
| — | −16 | −7108 | −8150 | −894 | −1115 | −701 | −1378 | * | * | | | | | | | | | | | | |
| 240(E) | 593 | −2044 | −252 | 2548 | −2437 | −1542 | −329 | −2133 | 151 | −2120 | −1274 | −244 | −1738 | 89 | 946 | −646 | −717 | −1734 | −2305 | −1686 | 246 |
| — | −149 | −500 | 233 | 43 | −381 | 399 | 106 | −626 | 210 | −466 | −720 | 275 | 394 | 45 | 96 | 359 | 117 | −369 | −294 | −249 | |
| — | −16 | −7108 | −8150 | −894 | −1115 | −701 | −1378 | * | * | | | | | | | | | | | | |
| 241(S) | 1884 | −835 | −1962 | −1576 | −1634 | −1436 | −1320 | 1041 | −1409 | −1453 | −781 | −1293 | −1922 | −1241 | −1606 | 1973 | −597 | −669 | −2036 | −1656 | 247 |
| — | −149 | −500 | 233 | 43 | −381 | 399 | 106 | −626 | 210 | −466 | −720 | 275 | 394 | 45 | 96 | 359 | 117 | −369 | −294 | −249 | |
| — | −16 | −7108 | −8150 | −894 | −1115 | −701 | −1378 | * | * | | | | | | | | | | | | |
| 242(G) | 2267 | −1043 | −2388 | −2526 | −3253 | 2642 | −2373 | −2975 | −2639 | −3260 | −2410 | −1722 | −2033 | −2311 | −2648 | −663 | −860 | −2005 | −3436 | −3250 | 248 |
| — | −149 | −500 | 233 | 43 | −381 | 399 | 106 | −626 | 210 | −466 | −720 | 275 | 394 | 45 | 96 | 359 | 117 | −369 | −294 | −249 | |
| — | −16 | −7108 | −8150 | −894 | −1115 | −701 | −1378 | * | * | | | | | | | | | | | | |
| 243(R) | −876 | −2087 | −829 | 1490 | −2474 | −1766 | −229 | −2106 | 1269 | −44 | −1198 | −424 | −1829 | 205 | 2225 | −775 | −768 | −1753 | −2143 | −1647 | 249 |
| — | −149 | −500 | 233 | 43 | −381 | 399 | 106 | −626 | 210 | −466 | −720 | 275 | 394 | 45 | 96 | 359 | 117 | −369 | −294 | −249 | |
| — | −16 | −7108 | −8150 | −894 | −1115 | −701 | −1378 | * | * | | | | | | | | | | | | |
| 244(V) | 2339 | −967 | −2970 | −2766 | −1878 | −1847 | −2252 | 32 | −2541 | −1299 | −918 | −2087 | −2399 | −2316 | −2545 | −1157 | −971 | 2345 | −2605 | −2251 | 250 |
| — | −149 | −500 | 233 | 43 | −381 | 399 | 106 | −626 | 210 | −466 | −720 | 275 | 394 | 45 | 96 | 359 | 117 | −369 | −294 | −249 | |
| — | −16 | −7108 | −8150 | −894 | −1115 | −701 | −1378 | * | * | | | | | | | | | | | | |
| 245(I) | −1827 | −1398 | −4307 | −3831 | −1099 | −3939 | −3142 | 2286 | −3619 | 1835 | 69 | −3579 | −3671 | −3177 | −3511 | −3178 | −1781 | 1918 | −2524 | −2310 | 251 |
| — | −149 | −500 | 233 | 43 | −381 | 399 | 106 | −626 | 210 | −466 | −720 | 275 | 394 | 45 | 96 | 359 | 117 | −369 | −294 | −249 | |
| — | −16 | −7108 | −8150 | −894 | −1115 | −701 | −1378 | * | * | | | | | | | | | | | | |
| 246(V) | −1178 | −1448 | −1943 | −1452 | −1776 | −2261 | −1140 | −227 | 1866 | −1260 | −816 | −1444 | −2448 | −902 | −540 | −1496 | −1176 | 2697 | −2161 | −1764 | 252 |
| — | −149 | −500 | 233 | 43 | −381 | 399 | 106 | −626 | 210 | −466 | −720 | 275 | 394 | 45 | 96 | 359 | 117 | −369 | −294 | −249 | |
| — | −16 | −7108 | −8150 | −894 | −1115 | −701 | −1378 | * | * | | | | | | | | | | | | |
| 247(E) | −508 | −1976 | 840 | 1547 | −2280 | −1393 | −117 | −2029 | 1400 | −1984 | −1077 | 1158 | −1531 | 330 | −253 | −378 | −454 | 262 | −2163 | −1471 | 253 |
| — | −149 | −500 | 233 | 43 | −381 | 399 | 106 | −626 | 210 | −466 | −720 | 275 | 394 | 45 | 96 | 359 | 117 | −369 | −294 | −249 | |
| — | −16 | −7108 | −8150 | −894 | −1115 | −701 | −1378 | * | * | | | | | | | | | | | | |
| 248(M) | 1703 | −991 | −2901 | −2342 | −528 | −2567 | −1550 | 166 | −2031 | 1544 | 2668 | −2104 | −2591 | −1715 | −2010 | −1685 | −1052 | −12 | −1442 | −1177 | 254 |
| — | −149 | −500 | 233 | 43 | −381 | 399 | 106 | −626 | 210 | −466 | −720 | 275 | 394 | 45 | 96 | 359 | 117 | −369 | −294 | −249 | |
| — | −16 | −7108 | −8150 | −894 | −1115 | −701 | −1378 | * | * | | | | | | | | | | | | |
| 249(I) | −1947 | −1516 | −4385 | −3885 | −916 | −4013 | −3118 | 2193 | −3656 | 2186 | 257 | −3656 | −3687 | −3109 | −3494 | −3250 | −1889 | 1383 | −2397 | −2258 | 255 |
| — | −149 | −500 | 233 | 43 | −381 | 399 | 106 | −626 | 210 | −466 | −720 | 275 | 394 | 45 | 96 | 359 | 117 | −369 | −294 | −249 | |
| — | −16 | −7108 | −8150 | −894 | −1115 | −701 | −1378 | * | * | | | | | | | | | | | | |
| 250(E) | −1322 | −2647 | −272 | 2491 | −3071 | −1811 | −576 | −2759 | 2306 | −2633 | −1854 | −464 | −2066 | −175 | −177 | −1144 | −1256 | −2368 | −2692 | −2140 | 256 |
| — | −149 | −500 | 233 | 43 | −381 | 399 | 106 | −626 | 210 | −466 | −720 | 275 | 394 | 45 | 96 | 359 | 117 | −369 | −294 | −249 | |
| — | −16 | −7108 | −8150 | −894 | −1115 | −701 | −1378 | * | * | | | | | | | | | | | | |
| 251(K) | −1395 | −2059 | −1711 | −1014 | −2215 | −2218 | −641 | −1709 | 3021 | −1652 | 2578 | −1075 | −2303 | −282 | 287 | −1423 | −1283 | −1603 | −2159 | −1803 | 257 |
| — | −149 | −500 | 233 | 43 | −381 | 399 | 106 | −626 | 210 | −466 | −720 | 275 | 394 | 45 | 96 | 359 | 117 | −369 | −294 | −249 | |
| — | −16 | −7108 | −8150 | −894 | −1115 | −701 | −1378 | * | * | | | | | | | | | | | | |
| 252(D) | −1285 | −2888 | 2677 | 176 | −3210 | 1189 | −737 | −3047 | −715 | −2977 | −2195 | −190 | −1979 | 2106 | −1379 | −1050 | −1315 | −2564 | −3161 | −2320 | 258 |
| — | −149 | −500 | 233 | 43 | −381 | 399 | 106 | −626 | 210 | −466 | −720 | 275 | 394 | 45 | 96 | 359 | 117 | −369 | −294 | −249 | |
| — | −16 | −7108 | −8150 | −894 | −1115 | −701 | −1378 | * | * | | | | | | | | | | | | |
| 253(I) | −2073 | −1632 | −4434 | −3975 | −911 | −4130 | −3238 | 3164 | −3706 | 1451 | 244 | −3779 | −3785 | −3187 | −3557 | −3413 | −2021 | 546 | −2449 | −2273 | 259 |
| — | −149 | −500 | 233 | 43 | −381 | 399 | 106 | −626 | 210 | −466 | −720 | 275 | 394 | 45 | 96 | 359 | 117 | −369 | −294 | −249 | |
| — | −16 | −7108 | −8150 | −894 | −1115 | −701 | −1378 | * | * | | | | | | | | | | | | |
| 254(K) | −1570 | −2144 | −1887 | −1191 | −2098 | −2363 | −750 | −1603 | 3034 | 938 | −1112 | −1231 | −2436 | −408 | 215 | −1616 | −1443 | −1580 | −2166 | −1804 | 260 |
| — | −149 | −500 | 233 | 43 | −381 | 399 | 106 | −626 | 210 | −466 | −720 | 275 | 394 | 45 | 96 | 359 | 117 | −369 | −294 | −249 | |
| — | −16 | −7108 | −8150 | −894 | −1115 | −701 | −1378 | * | * | | | | | | | | | | | | |
| 255(P) | −2931 | −2878 | −3420 | −3706 | −4181 | −2925 | −3468 | −4621 | −3859 | −4490 | −4165 | −3491 | 4225 | −3781 | −3695 | −3182 | −3279 | −4087 | −3594 | −4064 | 261 |
| — | −149 | −500 | 233 | 43 | −381 | 399 | 106 | −626 | 210 | −466 | −720 | 275 | 394 | 45 | 96 | 359 | 117 | −369 | −294 | −249 | |
| — | −16 | −7108 | −8150 | −894 | −1115 | −701 | −1378 | * | * | | | | | | | | | | | | |
| 256(R) | −928 | −1705 | −1507 | −1055 | −2761 | −1730 | −896 | −2490 | −44 | −2489 | −1723 | −1042 | −2102 | −543 | 2614 | 2258 | −1053 | −1998 | −2546 | −2158 | 262 |
| — | −149 | −500 | 233 | 43 | −381 | 399 | 106 | −626 | 210 | −466 | −720 | 275 | 394 | 45 | 96 | 359 | 117 | −369 | −294 | −249 | |
| — | −16 | −7108 | −8150 | −894 | −1115 | −701 | −1378 | * | * | | | | | | | | | | | | |
| 257(D) | −1280 | −2865 | 3154 | 175 | −3194 | −1547 | −743 | −3034 | −728 | −2971 | −2194 | −190 | −1979 | 1342 | −1391 | 553 | −1316 | −2552 | −3161 | −2317 | 263 |
| — | −149 | −500 | 233 | 43 | −381 | 399 | 106 | −626 | 210 | −466 | −720 | 275 | 394 | 45 | 96 | 359 | 117 | −369 | −294 | −249 | |
| — | −16 | −7108 | −8150 | −894 | −1115 | −701 | −1378 | * | * | | | | | | | | | | | | |
| 258(I) | −1997 | −1562 | −4355 | −3927 | −1042 | −4066 | −3261 | 3343 | −3654 | 937 | 97 | −3718 | −3783 | −3239 | −3555 | −3354 | −1959 | 702 | −2549 | −2295 | 264 |
| — | −149 | −500 | 233 | 43 | −381 | 399 | 106 | −626 | 210 | −466 | −720 | 275 | 394 | 45 | 96 | 359 | 117 | −369 | −294 | −249 | |
| — | −16 | −7108 | −8150 | −894 | −1115 | −701 | −1378 | * | * | | | | | | | | | | | | |
| 259(M) | −2252 | −1821 | −4572 | −3991 | −530 | −4164 | −2990 | 2068 | −3709 | 1993 | 3197 | −3808 | −3685 | −2916 | −3406 | −3378 | −2149 | −172 | −2084 | −2091 | 265 |
| — | −149 | −500 | 233 | 43 | −381 | 399 | 106 | −626 | 210 | −466 | −720 | 275 | 394 | 45 | 96 | 359 | 117 | −369 | −294 | −249 | |
| — | −16 | −7108 | −8150 | −894 | −1115 | −701 | −1378 | * | * | | | | | | | | | | | | |
| 260(T) | −1213 | −1674 | −2755 | −2906 | −3163 | −1922 | −2659 | −2698 | −2788 | −3105 | −2612 | −2311 | −2600 | −2708 | −2753 | −1463 | 3819 | −2197 | −3286 | −3156 | 266 |
| — | −149 | −500 | 233 | 43 | −381 | 399 | 106 | −626 | 210 | −466 | −720 | 275 | 394 | 45 | 96 | 359 | 117 | −369 | −294 | −249 | |
| — | −16 | −7108 | −8150 | −894 | −1115 | −701 | −1378 | * | * | | | | | | | | | | | | |
| 261(R) | −2131 | −2786 | −2704 | −1460 | −3618 | −2638 | −587 | −2976 | 1735 | −2645 | −1985 | −1353 | −2603 | −173 | 3492 | −2020 | −1828 | −2748 | −2484 | −2384 | 267 |
| — | −149 | −500 | 233 | 43 | −381 | 399 | 106 | −626 | 210 | −466 | −720 | 275 | 394 | 45 | 96 | 359 | 117 | −369 | −294 | −249 | |
| — | −16 | −7108 | −8150 | −894 | −1115 | −701 | −1378 | * | * | | | | | | | | | | | | |
| 262(K) | −1349 | −2635 | −381 | 2083 | −3083 | −1857 | −565 | −2750 | 2690 | −2612 | −1837 | −514 | −2090 | −161 | −61 | −1178 | −1271 | −2369 | −2655 | −2138 | 268 |
| — | −149 | −500 | 233 | 43 | −381 | 399 | 106 | −626 | 210 | −466 | −720 | 275 | 394 | 45 | 96 | 359 | 117 | −369 | −294 | −249 | |
| — | −16 | −7108 | −8150 | −894 | −1115 | −701 | −1378 | * | * | | | | | | | | | | | | |
| 263(A) | 2821 | −932 | −2451 | −2472 | −3065 | −1198 | −2233 | −2763 | −2434 | −3056 | −2201 | −1633 | −1940 | −2147 | −2468 | 1831 | −730 | −1840 | −3305 | −3055 | 269 |
| — | −149 | −500 | 233 | 43 | −381 | 399 | 106 | −626 | 210 | −466 | −720 | 275 | 394 | 45 | 96 | 359 | 117 | −369 | −294 | −249 | |
| — | −16 | −7108 | −8150 | −894 | −1115 | −701 | −1378 | * | * | | | | | | | | | | | | |
| 264(F) | −2063 | −1686 | −4037 | −3677 | 3437 | −3644 | −1706 | 2063 | −3359 | 135 | 67 | −3095 | −3486 | −2739 | −3127 | −2876 | −2012 | −83 | −1038 | −158 | 270 |
| — | −149 | −500 | 233 | 43 | −381 | 399 | 106 | −626 | 210 | −466 | −720 | 275 | 394 | 45 | 96 | 359 | 117 | −369 | −294 | −249 | |
| — | −16 | −7108 | −8150 | −894 | −1115 | −701 | −1378 | * | * | | | | | | | | | | | | |
| 265(E) | −2641 | −3308 | −896 | 3732 | −3966 | −2458 | −2043 | −4105 | −2128 | −4016 | −3555 | −1531 | −2959 | −1842 | −2560 | −2479 | −2750 | −3722 | −3563 | −3385 | 271 |
| — | −149 | −500 | 233 | 43 | −381 | 399 | 106 | −626 | 210 | −466 | −720 | 275 | 394 | 45 | 96 | 359 | 117 | −369 | −294 | −249 | |
| — | −16 | −7108 | −8150 | −894 | −1115 | −701 | −1378 | * | * | | | | | | | | | | | | |
| 266(N) | −1662 | −3306 | 2055 | 78 | −3621 | −1643 | −1040 | −3622 | −1272 | −3531 | −2870 | 3477 | −2182 | −724 | −2071 | −1371 | −1757 | −3092 | −3633 | −2700 | 272 |
| — | −149 | −500 | 233 | 43 | −381 | 399 | 106 | −626 | 210 | −466 | −720 | 275 | 394 | 45 | 96 | 359 | 117 | −369 | −294 | −249 | |
| — | −16 | −7108 | −8150 | −894 | −1115 | −701 | −1378 | * | * | | | | | | | | | | | | |
| 267(A) | 3438 | −1472 | −2846 | −3040 | −3287 | −1726 | −2735 | −2840 | −3028 | −3257 | −2662 | −2236 | −2447 | −2798 | −2944 | −1216 | −1387 | −2183 | −3405 | −3320 | 273 |
| — | −149 | −500 | 233 | 43 | −381 | 399 | 106 | −626 | 210 | −466 | −720 | 275 | 394 | 45 | 96 | 359 | 117 | −369 | −294 | −249 | |
| — | −16 | −7108 | −8150 | −894 | −1115 | −701 | −1378 | * | * | | | | | | | | | | | | |
| 268(I) | −1760 | −1307 | −4325 | −3962 | −1735 | −4042 | −3726 | 3135 | −3828 | −579 | −515 | −3722 | −3869 | −3673 | −3896 | −3359 | −1752 | 2276 | −3240 | −2806 | 274 |
| — | −149 | −500 | 233 | 43 | −381 | 399 | 106 | −626 | 210 | −466 | −720 | 275 | 394 | 45 | 96 | 359 | 117 | −369 | −294 | −249 | |
| — | −16 | −7108 | −8150 | −894 | −1115 | −701 | −1378 | * | * | | | | | | | | | | | | |
| 269(T) | 1428 | −904 | −2334 | −2158 | −2747 | −1206 | −1940 | −2392 | −2037 | −2678 | −1846 | −1504 | −1896 | −1809 | −2163 | 902 | 3001 | −1635 | −2999 | −2705 | 275 |
| — | −149 | −500 | 233 | 43 | −381 | 399 | 106 | −626 | 210 | −466 | −720 | 275 | 394 | 45 | 96 | 359 | 117 | −369 | −294 | −249 | |
| — | −16 | −7108 | −8150 | −894 | −1115 | −701 | −1378 | * | * | | | | | | | | | | | | |
| 270(V) | −1745 | −1300 | −4286 | −3858 | −1446 | −3967 | −3370 | 2358 | −3688 | 852 | −261 | −3606 | −3749 | −3403 | −3673 | −3232 | −1717 | 2643 | −2856 | −2524 | 276 |
| — | −149 | −500 | 233 | 43 | −381 | 399 | 106 | −626 | 210 | −466 | −720 | 275 | 394 | 45 | 96 | 359 | 117 | −369 | −294 | −249 | |
| — | −16 | −7108 | −8150 | −894 | −1115 | −701 | −1378 | * | * | | | | | | | | | | | | |
| 271(V) | −1404 | −1072 | −3766 | −3305 | −1464 | −3356 | −2696 | 2276 | −3080 | −616 | −379 | −3001 | −3325 | −2870 | −3091 | −2563 | 1344 | 2521 | −2516 | −2113 | 277 |
| — | −149 | −500 | 233 | 43 | −381 | 399 | 106 | −626 | 210 | −466 | −720 | 275 | 394 | 45 | 96 | 359 | 117 | −369 | −294 | −249 | |
| — | −16 | −7108 | −8150 | −894 | −1115 | −701 | −1378 | * | * | | | | | | | | | | | | |
| 272(M) | 866 | −1113 | −2656 | −2412 | −1322 | −1920 | −1883 | −487 | −2061 | −587 | 4451 | −1950 | −2387 | −1928 | −2078 | −1220 | −1053 | −498 | −2134 | −1803 | 278 |
| — | −149 | −500 | 233 | 43 | −381 | 399 | 106 | −626 | 210 | −466 | −720 | 275 | 394 | 45 | 96 | 359 | 117 | −369 | −294 | −249 | |
| — | −16 | −7108 | −8150 | −894 | −1115 | −701 | −1378 | * | * | | | | | | | | | | | | |
| 273(A) | 2601 | −957 | −2898 | −2711 | −1943 | −1740 | −2211 | −165 | −2487 | −1406 | −1001 | −2008 | −2320 | −2260 | −2494 | −1053 | −929 | 1990 | −2626 | −2279 | 279 |
| — | −149 | −500 | 233 | 43 | −381 | 399 | 106 | −626 | 210 | −466 | −720 | 275 | 394 | 45 | 96 | 359 | 117 | −369 | −294 | −249 | |
| — | −16 | −7108 | −8150 | −894 | −1115 | −701 | −1378 | * | * | | | | | | | | | | | | |
| 274(L) | −1171 | −983 | −3266 | −2733 | −796 | −2795 | −1888 | 590 | −2418 | 2001 | 198 | −2418 | −2816 | −2106 | −2362 | −1944 | 965 | 1777 | −1724 | −1426 | 280 |
| — | −149 | −500 | 233 | 43 | −381 | 399 | 106 | −626 | 210 | −466 | −720 | 275 | 394 | 45 | 96 | 359 | 117 | −369 | −294 | −249 | |
| — | −16 | −7108 | −8150 | −894 | −1115 | −701 | −1378 | * | * | | | | | | | | | | | | |
| 275(G) | −2594 | −2690 | −3304 | −3623 | −4328 | 3747 | −3462 | −4761 | −3953 | −4671 | −4212 | −3320 | −3352 | −3748 | −3779 | −2839 | −2981 | −4004 | −3668 | −4222 | 281 |
| — | −149 | −500 | 233 | 43 | −381 | 399 | 106 | −626 | 210 | −466 | −720 | 275 | 394 | 45 | 96 | 359 | 117 | −369 | −294 | −249 | |
| — | −16 | −7108 | −8150 | −894 | −1115 | −701 | −1378 | * | * | | | | | | | | | | | | |
| 276(G) | −2594 | −2690 | −3304 | −3623 | −4328 | 3747 | −3462 | −4761 | −3953 | −4671 | −4212 | −3320 | −3352 | −3748 | −3779 | −2839 | −2981 | −4004 | −3668 | −4222 | 282 |
| — | −149 | −500 | 233 | 43 | −381 | 399 | 106 | −626 | 210 | −466 | −720 | 275 | 394 | 45 | 96 | 359 | 117 | −369 | −294 | −249 | |
| — | −16 | −7108 | −8150 | −894 | −1115 | −701 | −1378 | * | * | | | | | | | | | | | | |
| 277(S) | −897 | −1462 | −2333 | −2543 | −3185 | −1640 | −2474 | −3294 | −2686 | −3497 | −2780 | −1973 | −2360 | −2483 | −2703 | 3465 | −1316 | −2413 | −3310 | −3025 | 283 |
| — | −149 | −500 | 233 | 43 | −381 | 399 | 106 | −626 | 210 | −466 | −720 | 275 | 394 | 45 | 96 | 359 | 117 | −369 | −294 | −249 | |
| — | −16 | −7108 | −8150 | −894 | −1115 | −701 | −1378 | * | * | | | | | | | | | | | | |
| 278(T) | −1213 | −1674 | −2755 | −2906 | −3163 | −1922 | −2659 | −2698 | −2788 | −3105 | −2612 | −2311 | −2600 | −2708 | −2753 | −1463 | 3819 | −2197 | −3286 | −3156 | 284 |
| — | −149 | −500 | 233 | 43 | −381 | 399 | 106 | −626 | 210 | −466 | −720 | 275 | 394 | 45 | 96 | 359 | 117 | −369 | −294 | −249 | |
| — | −16 | −7108 | −8150 | −894 | −1115 | −701 | −1378 | * | * | | | | | | | | | | | | |
| 279(N) | −2171 | −2655 | −1458 | −1748 | −3334 | −2364 | −2267 | −3943 | −2365 | −3936 | −3437 | 4205 | −2932 | −2205 | −2608 | −2224 | −2439 | −3392 | −3253 | −2909 | 285 |
| — | −149 | −500 | 233 | 43 | −381 | 399 | 106 | −626 | 210 | −466 | −720 | 275 | 394 | 45 | 96 | 359 | 117 | −369 | −294 | −249 | |
| — | −16 | −7108 | −8150 | −894 | −1115 | −701 | −1378 | * | * | | | | | | | | | | | | |
| 280(A) | 3134 | −934 | −2491 | −2567 | −3083 | −1203 | −2300 | −2766 | −2540 | −3082 | −2237 | −1672 | −1954 | −2240 | −2537 | 874 | −747 | −1844 | −3333 | −3093 | 286 |
| — | −149 | −500 | 233 | 43 | −381 | 399 | 106 | −626 | 210 | −466 | −720 | 275 | 394 | 45 | 96 | 359 | 117 | −369 | −294 | −249 | |
| — | −16 | −7108 | −8150 | −894 | −1115 | −701 | −1378 | * | * | | | | | | | | | | | | |
| 281(V) | −984 | −1045 | −3169 | −2909 | −1709 | −2304 | −2404 | 531 | −2643 | −988 | −697 | −2378 | −2722 | −2480 | −2661 | −1601 | 1504 | 3014 | −2588 | −2201 | 287 |
| — | −149 | −500 | 233 | 43 | −381 | 399 | 106 | −626 | 210 | −466 | −720 | 275 | 394 | 45 | 96 | 359 | 117 | −369 | −294 | −249 | |
| — | −16 | −7108 | −8150 | −894 | −1115 | −701 | −1378 | * | * | | | | | | | | | | | | |
| 282(L) | −2631 | −2159 | −4786 | −4228 | −462 | −4506 | −3231 | 96 | −3878 | 2828 | 2482 | −4157 | −3880 | −3016 | −3541 | −3793 | −2509 | −608 | −2134 | −2182 | 288 |
| — | −149 | −500 | 233 | 43 | −381 | 399 | 106 | −626 | 210 | −466 | −720 | 275 | 394 | 45 | 96 | 359 | 117 | −369 | −294 | −249 | |
| — | −16 | −7108 | −8150 | −894 | −1115 | −701 | −1378 | * | * | | | | | | | | | | | | |
| 283(H) | −3205 | −3079 | −2723 | −2890 | −2110 | −3046 | 5295 | −4135 | −2617 | −3813 | −3561 | −2886 | −3482 | −2833 | −2620 | −3291 | −3356 | −3895 | −2397 | −1681 | 289 |
| — | −149 | −500 | 233 | 43 | −381 | 399 | 106 | −626 | 210 | −466 | −720 | 275 | 394 | 45 | 96 | 359 | 117 | −369 | −294 | −249 | |
| — | −16 | −7108 | −8150 | −894 | −1115 | −701 | −1378 | * | * | | | | | | | | | | | | |
| 284(L) | −1623 | −1338 | −3726 | −3164 | −251 | −3255 | −1820 | 1373 | −2808 | 2371 | 514 | −2785 | −3086 | −2281 | −2613 | −2389 | −1543 | −161 | −1311 | 1782 | 290 |
| — | −149 | −500 | 233 | 43 | −381 | 399 | 106 | −626 | 210 | −466 | −720 | 275 | 394 | 45 | 96 | 359 | 117 | −369 | −294 | −249 | |
| — | −16 | −7108 | −8150 | −894 | −1115 | −701 | −1378 | * | * | | | | | | | | | | | | |
| 285(L) | −2333 | −1873 | −4640 | −4127 | −650 | −4326 | −3241 | 2176 | −3843 | 2519 | 523 | −3982 | −3833 | −3105 | −3579 | −3604 | −2247 | 56 | −2268 | −2230 | 291 |
| — | −149 | −500 | 233 | 43 | −381 | 399 | 106 | −626 | 210 | −466 | −720 | 275 | 394 | 45 | 96 | 359 | 117 | −369 | −294 | −249 | |
| — | −16 | −7108 | −8150 | −894 | −1115 | −701 | −1378 | * | * | | | | | | | | | | | | |
| 286(A) | 3438 | −1472 | −2846 | −3040 | −3287 | −1726 | −2735 | −2840 | −3028 | −3257 | −2662 | −2236 | −2447 | −2798 | −2944 | −1216 | −1387 | −2183 | −3405 | −3320 | 292 |
| — | −149 | −500 | 233 | 43 | −381 | 399 | 106 | −626 | 210 | −466 | −720 | 275 | 394 | 45 | 96 | 359 | 117 | −369 | −294 | −249 | |
| — | −16 | −7108 | −8150 | −894 | −1115 | −701 | −1378 | * | * | | | | | | | | | | | | |
| 287(M) | −1886 | −1507 | −4178 | −3693 | −877 | −3806 | −2901 | 3008 | −3380 | 335 | 3109 | −3451 | −3570 | −2934 | −3251 | −3044 | −1840 | 524 | −2288 | −2089 | 293 |
| — | −149 | −500 | 233 | 43 | −381 | 399 | 106 | −626 | 210 | −466 | −720 | 275 | 394 | 45 | 96 | 359 | 117 | −369 | −294 | −249 | |
| — | −16 | −7108 | −8150 | −894 | −1115 | −701 | −1378 | * | * | | | | | | | | | | | | |
| 288(A) | 3438 | −1472 | −2846 | −3040 | −3287 | −1726 | −2735 | −2840 | −3028 | −3257 | −2662 | −2236 | −2447 | −2798 | −2944 | −1216 | −1387 | −2183 | −3405 | −3320 | 294 |
| — | −149 | −500 | 233 | 43 | −381 | 399 | 106 | −626 | 210 | −466 | −720 | 275 | 394 | 45 | 96 | 359 | 117 | −369 | −294 | −249 | |
| — | −16 | −7108 | −8150 | −894 | −1115 | −701 | −1378 | * | * | | | | | | | | | | | | |
| 289(H) | −1490 | −2484 | −362 | −476 | −1816 | −1880 | 4320 | −2854 | −684 | −2770 | −2133 | 2185 | −2285 | −728 | −1000 | −1377 | −1550 | −2475 | −2146 | −1255 | 295 |
| — | −149 | −500 | 233 | 43 | −381 | 399 | 106 | −626 | 210 | −466 | −720 | 275 | 394 | 45 | 96 | 359 | 117 | −369 | −294 | −249 | |
| — | −16 | −7108 | −8150 | −894 | −1115 | −701 | −1378 | * | * | | | | | | | | | | | | |
| 290(A) | 2439 | −911 | −2326 | −2131 | −2811 | −1197 | −1934 | −2480 | −2011 | −2745 | −1898 | −1490 | −1888 | −1785 | −2153 | 1898 | 1073 | −1682 | −3044 | −2749 | 296 |
| — | −149 | −500 | 233 | 43 | −381 | 399 | 106 | −626 | 210 | −466 | −720 | 275 | 394 | 45 | 96 | 359 | 117 | −369 | −294 | −249 | |
| — | −16 | −7108 | −8150 | −894 | −1115 | −701 | −1378 | * | * | | | | | | | | | | | | |
| 291(I) | 2038 | −985 | −3388 | −2919 | −1320 | −2893 | −2277 | 2155 | −2677 | −587 | −297 | −2593 | −2992 | −2450 | −2697 | −2087 | −1208 | 1681 | −2229 | −1846 | 297 |
| — | −149 | −500 | 233 | 43 | −381 | 399 | 106 | −626 | 210 | −466 | −720 | 275 | 394 | 45 | 96 | 359 | 117 | −369 | −294 | −249 | |
| — | −16 | −7108 | −8150 | −894 | −1115 | −701 | −1378 | * | * | | | | | | | | | | | | |
| 292(G) | −1243 | −2769 | 311 | 1902 | −3172 | 1980 | −744 | −2992 | −697 | −2936 | −2152 | 1923 | −1974 | −377 | −1331 | −1030 | −1284 | −2506 | −3125 | −2308 | 298 |
| — | −149 | −500 | 233 | 43 | −381 | 399 | 106 | −626 | 210 | −466 | −720 | 275 | 394 | 45 | 96 | 359 | 117 | −369 | −294 | −249 | |
| — | −16 | −7108 | −8150 | −894 | −1115 | −701 | −1378 | * | * | | | | | | | | | | | | |
| 293(V) | −1738 | −1298 | −4281 | −3921 | −1737 | −3979 | −3665 | 1917 | −3774 | −601 | −528 | −3671 | −3834 | −3628 | −3843 | −3293 | −1735 | 3205 | −3215 | −2770 | 299 |
| — | −149 | −500 | 233 | 43 | −381 | 399 | 106 | −626 | 210 | −466 | −720 | 275 | 394 | 45 | 96 | 359 | 117 | −369 | −294 | −249 | |
| — | −16 | −7108 | −8150 | −894 | −1115 | −701 | −1378 | * | * | | | | | | | | | | | | |
| 294(E) | −833 | −2344 | 1092 | 2412 | −2643 | −1464 | −386 | −2413 | −146 | −2369 | −1505 | −96 | 562 | 29 | −717 | −666 | 862 | −1966 | −2562 | −1818 | 300 |
| — | −149 | −500 | 233 | 43 | −381 | 399 | 106 | −626 | 210 | −466 | −720 | 275 | 394 | 45 | 96 | 359 | 117 | −369 | −294 | −249 | |
| — | −16 | −7108 | −8150 | −894 | −1115 | −701 | −1378 | * | * | | | | | | | | | | | | |
| 295(W) | −1380 | −1116 | −3614 | −3026 | 1322 | −2981 | −1582 | 1966 | −2661 | 1775 | 556 | −2562 | −2865 | −2117 | −2424 | −2098 | −1302 | −187 | 2908 | −629 | 301 |
| — | −149 | −500 | 233 | 43 | −381 | 399 | 106 | −626 | 210 | −466 | −720 | 275 | 394 | 45 | 96 | 359 | 117 | −369 | −294 | −249 | |
| — | −16 | −7108 | −8150 | −894 | −1115 | −701 | −1378 | * | * | | | | | | | | | | | | |
| 296(T) | −350 | −973 | −2204 | −2178 | −2893 | −1236 | −2035 | −2561 | −2117 | −2862 | −2043 | −1536 | −1946 | −1916 | −2214 | 1618 | 3198 | −1758 | −3137 | −2831 | 302 |
| — | −149 | −500 | 233 | 43 | −381 | 399 | 106 | −626 | 210 | −466 | −720 | 275 | 394 | 45 | 96 | 359 | 117 | −369 | −294 | −249 | |
| — | −16 | −7108 | −8150 | −894 | −1115 | −701 | −1378 | * | * | | | | | | | | | | | | |
| 297(L) | −1443 | −1269 | −3144 | −2576 | −528 | −3014 | −1816 | 1945 | −2155 | 2102 | 508 | −2422 | −2899 | 1193 | −2133 | −2129 | −1369 | −50 | −1616 | −1384 | 303 |
| — | −149 | −500 | 233 | 43 | −381 | 399 | 106 | −626 | 210 | −466 | −720 | 275 | 394 | 45 | 96 | 359 | 117 | −369 | −294 | −249 | |
| — | −16 | −7108 | −8150 | −894 | −1115 | −701 | −1378 | * | * | | | | | | | | | | | | |
| 298(D) | −1826 | −3682 | 3559 | 1199 | −3883 | −1662 | −1073 | −3846 | −1391 | −3720 | −3110 | −272 | −2222 | −760 | −2283 | −1471 | −1913 | −3321 | −3864 | −2864 | 304 |
| — | −149 | −500 | 233 | 43 | −381 | 399 | 106 | −626 | 210 | −466 | −720 | 275 | 394 | 45 | 96 | 359 | 117 | −369 | −294 | −249 | |
| — | −16 | −7108 | −8150 | −894 | −1115 | −701 | −1378 | * | * | | | | | | | | | | | | |
| 299(D) | −2784 | −3432 | 4016 | −1200 | −4140 | −2466 | −2197 | −4505 | −2621 | −4365 | −3956 | −1551 | −3014 | −2039 | −3232 | −2593 | −2938 | −4046 | −3710 | −3552 | 305 |
| — | −149 | −500 | 233 | 43 | −381 | 399 | 106 | −626 | 210 | −466 | −720 | 275 | 394 | 45 | 96 | 359 | 117 | −369 | −294 | −249 | |
| — | −16 | −7108 | −8150 | −894 | −1115 | −701 | −1378 | * | * | | | | | | | | | | | | |
| 300(F) | −3342 | −2776 | −4026 | −4232 | 4354 | −3545 | −1431 | −2315 | −4038 | −1801 | −1900 | −3299 | −3780 | −3350 | −3645 | −3490 | −3420 | −2566 | −739 | 349 | 306 |
| — | −149 | −500 | 233 | 43 | −381 | 399 | 106 | −626 | 210 | −466 | −720 | 275 | 394 | 45 | 96 | 359 | 117 | −369 | −294 | −249 | |
| — | −16 | −7108 | −8150 | −894 | −1115 | −701 | −1378 | * | * | | | | | | | | | | | | |
| 301(Q) | −1048 | −2608 | 205 | 2170 | −2893 | −1535 | −505 | −2680 | −255 | −2604 | −1769 | 1814 | −1849 | 2272 | −789 | −848 | −1028 | −2228 | −2770 | −2013 | 307 |
| — | −149 | −500 | 233 | 43 | −381 | 399 | 106 | −626 | 210 | −466 | −720 | 275 | 394 | 45 | 96 | 359 | 117 | −369 | −294 | −249 | |
| — | −16 | −7108 | −8150 | −894 | −1115 | −701 | −1378 | * | * | | | | | | | | | | | | |
| 302(R) | 1083 | −1687 | 691 | 135 | −2058 | −1406 | −178 | −1755 | 214 | −1793 | −924 | −145 | −1553 | 247 | 1670 | −383 | 1217 | −1367 | −2031 | −1404 | 308 |
| — | −149 | −500 | 233 | 43 | −381 | 399 | 106 | −626 | 210 | −466 | −720 | 275 | 394 | 45 | 96 | 359 | 117 | −369 | −294 | −249 | |
| — | −16 | −7108 | −8150 | −894 | −1115 | −701 | −1378 | * | * | | | | | | | | | | | | |
| 303(I) | −1915 | −1536 | −4077 | −3667 | 2027 | −3678 | −2155 | 3137 | −3381 | 144 | 94 | −3225 | −3506 | −2848 | −3202 | −2914 | −1871 | 345 | −1522 | −791 | 309 |
| — | −149 | −500 | 233 | 43 | −381 | 399 | 106 | −626 | 210 | −466 | −720 | 275 | 394 | 45 | 96 | 359 | 117 | −369 | −294 | −249 | |
| — | −16 | −7108 | −8150 | −894 | −1115 | −701 | −1378 | * | * | | | | | | | | | | | | |
| 304(R) | −689 | −2015 | −494 | 24 | −2395 | −1582 | −184 | −2087 | 444 | −2020 | −1151 | 1161 | −1687 | 1832 | 2131 | 626 | −614 | −1684 | −2156 | −1573 | 310 |
| — | −149 | −500 | 233 | 43 | −381 | 399 | 106 | −626 | 210 | −466 | −720 | 275 | 394 | 45 | 96 | 359 | 117 | −369 | −294 | −249 | |
| — | −16 | −7108 | −8150 | −894 | −1115 | −701 | −1378 | * | * | | | | | | | | | | | | |
| 305(D) | 387 | −1967 | 1600 | 1359 | −2275 | −1391 | 1561 | −2025 | 282 | −1976 | −1067 | −25 | −1525 | 342 | 1024 | −369 | −443 | −1584 | −2152 | −1462 | 311 |
| — | −149 | −500 | 233 | 43 | −381 | 399 | 106 | −626 | 210 | −466 | −720 | 275 | 394 | 45 | 96 | 359 | 117 | −369 | −294 | −249 | |
| — | −16 | −7108 | −8150 | −894 | −1115 | −701 | −1378 | * | * | | | | | | | | | | | | |
| 306(R) | −1460 | −2315 | −1793 | −887 | −2832 | −2237 | −431 | −2288 | 2193 | −2199 | −1473 | −946 | −2245 | −20 | 2706 | −1394 | −1275 | 591 | −2248 | −1961 | 312 |
| — | −149 | −500 | 233 | 43 | −381 | 399 | 106 | −626 | 210 | −466 | −720 | 275 | 394 | 45 | 96 | 359 | 117 | −369 | −294 | −249 | |
| — | −16 | −7108 | −8150 | −894 | −1115 | −701 | −1378 | * | * | | | | | | | | | | | | |
| 307(V) | −941 | −1027 | −3099 | −2832 | −1692 | −2234 | −2324 | 470 | −2565 | −1003 | −695 | −2305 | −2663 | −2399 | −2587 | −1527 | 1858 | 2876 | −2536 | −2152 | 313 |
| — | −149 | −500 | 233 | 43 | −381 | 399 | 106 | −626 | 210 | −466 | −720 | 275 | 394 | 45 | 96 | 359 | 117 | −369 | −294 | −249 | |
| — | −16 | −7108 | −8150 | −894 | −1115 | −701 | −1378 | * | * | | | | | | | | | | | | |
| 308(P) | −2931 | −2878 | −3420 | −3706 | −4181 | −2925 | −3468 | −4621 | −3859 | −4490 | −4165 | −3491 | 4225 | −3781 | −3695 | −3182 | −3279 | −4087 | −3594 | −4064 | 314 |
| — | −149 | −500 | 233 | 43 | −381 | 399 | 106 | −626 | 210 | −466 | −720 | 275 | 394 | 45 | 96 | 359 | 117 | −369 | −294 | −249 | |
| — | −16 | −7108 | −8150 | −894 | −1115 | −701 | −1378 | * | * | | | | | | | | | | | | |
| 309(V) | −1090 | −1215 | −2097 | −1824 | −819 | −2221 | 2699 | −287 | −1392 | −1027 | −591 | −1674 | −2482 | −1446 | −1482 | −1482 | −1143 | 2879 | −1420 | −707 | 315 |
| — | −149 | −500 | 233 | 43 | −381 | 399 | 106 | −626 | 210 | −466 | −720 | 275 | 394 | 45 | 96 | 359 | 117 | −369 | −294 | −249 | |
| — | −16 | −7108 | −8150 | −894 | −1115 | −701 | −1378 | * | * | | | | | | | | | | | | |
| 310(L) | −2439 | −1972 | −4702 | −4181 | −588 | −4401 | −3258 | 1582 | −3881 | 2757 | 587 | −4061 | −3862 | −3093 | −3590 | −3689 | −2344 | −130 | −2230 | −2217 | 316 |
| — | −149 | −500 | 233 | 43 | −381 | 399 | 106 | −626 | 210 | −466 | −720 | 275 | 394 | 45 | 96 | 359 | 117 | −369 | −294 | −249 | |
| — | −16 | −7108 | −8150 | −894 | −1115 | −701 | −1378 | * | * | | | | | | | | | | | | |
| 311(C) | 2157 | 4166 | −3012 | −2973 | −2780 | 1022 | −2337 | −2398 | −2724 | −2744 | −1930 | −1786 | −1943 | −2372 | −2623 | −540 | −692 | −1624 | −3091 | −2881 | 317 |
| — | −149 | −500 | 233 | 43 | −381 | 399 | 106 | −626 | 210 | −466 | −720 | 275 | 394 | 45 | 96 | 359 | 117 | −369 | −294 | −249 | |
| — | −16 | −7108 | −8150 | −894 | −1115 | −701 | −1378 | * | * | | | | | | | | | | | | |
| 312(D) | −1732 | −3453 | 3468 | 99 | −3733 | −1645 | −1066 | −3747 | −1356 | −3641 | −3008 | 1690 | −2201 | −755 | −2209 | −1416 | −1833 | −3208 | −3752 | −2776 | 318 |
| — | −149 | −500 | 233 | 43 | −381 | 399 | 106 | −626 | 210 | −466 | −720 | 275 | 394 | 45 | 96 | 359 | 117 | −369 | −294 | −249 | |
| — | −16 | −7108 | −8150 | −894 | −1115 | −701 | −1378 | * | * | | | | | | | | | | | | |
| 313(L) | −2477 | −2023 | −4713 | −4122 | 1592 | −4329 | −2920 | 72 | −3835 | 2593 | 2472 | −3948 | −3754 | −2914 | −3466 | −3550 | −2350 | −634 | −1927 | −1830 | 319 |
| — | −149 | −500 | 233 | 43 | −381 | 399 | 106 | −626 | 210 | −466 | −720 | 275 | 394 | 45 | 96 | 359 | 117 | −369 | −294 | −249 | |
| — | −16 | −7108 | −8150 | −894 | −1115 | −701 | −1378 | * | * | | | | | | | | | | | | |
| 314(K) | −2620 | −2961 | −2461 | −2046 | −3743 | −2791 | −1570 | −3603 | 3784 | −3387 | −2839 | −2048 | −3039 | −1260 | −465 | −2604 | −2536 | −3331 | −3001 | −2988 | 320 |
| — | −149 | −500 | 233 | 43 | −381 | 399 | 106 | −626 | 210 | −466 | −720 | 275 | 394 | 45 | 96 | 359 | 117 | −369 | −294 | −249 | |
| — | −16 | −7108 | −8150 | −894 | −1115 | −701 | −1378 | * | * | | | | | | | | | | | | |
| 315(P) | −2931 | −2878 | −3420 | −3706 | −4181 | −2925 | −3468 | −4621 | −3859 | −4490 | −4165 | −3491 | 4225 | −3781 | −3695 | −3182 | −3279 | −4087 | −3594 | −4064 | 321 |
| — | −149 | −500 | 233 | 43 | −381 | 399 | 106 | −626 | 210 | −466 | −720 | 275 | 394 | 45 | 96 | 359 | 117 | −369 | −294 | −249 | |
| — | −16 | −7108 | −8150 | −894 | −1115 | −701 | −1378 | * | * | | | | | | | | | | | | |
| 316(S) | −897 | −1462 | −2333 | −2543 | −3185 | −1640 | −2474 | −3294 | −2686 | −3497 | −2780 | −1973 | −2360 | −2483 | −2703 | 3465 | −1316 | −2413 | −3310 | −3025 | 322 |
| — | −149 | −500 | 233 | 43 | −381 | 399 | 106 | −626 | 210 | −466 | −720 | 275 | 394 | 45 | 96 | 359 | 117 | −369 | −294 | −249 | |
| — | −16 | −7108 | −8150 | −894 | −1115 | −701 | −1378 | * | * | | | | | | | | | | | | |
| 317(G) | −2594 | −2690 | −3304 | −3623 | −4328 | 3747 | −3462 | −4761 | −3953 | −4671 | −4212 | −3320 | −3352 | −3748 | −3779 | −2839 | −2981 | −4004 | −3668 | −4222 | 323 |
| — | −149 | −500 | 233 | 43 | −381 | 399 | 106 | −626 | 210 | −466 | −720 | 275 | 394 | 45 | 96 | 359 | 117 | −369 | −294 | −249 | |
| — | −16 | −7108 | −8150 | −894 | −1115 | −701 | −1378 | * | * | | | | | | | | | | | | |
| 318(K) | 2 | −2257 | −1073 | −374 | −2740 | −1908 | −278 | −2339 | 2328 | −2192 | −1373 | −562 | −1953 | 2273 | 1344 | −952 | −933 | −1980 | −2234 | −1799 | 324 |
| — | −149 | −500 | 233 | 43 | −381 | 399 | 106 | −626 | 210 | −466 | −720 | 275 | 394 | 45 | 96 | 359 | 117 | −369 | −294 | −249 | |
| — | −16 | −7108 | −8150 | −894 | −1115 | −701 | −1378 | * | * | | | | | | | | | | | | |
| 319(Y) | −3482 | −2868 | −3701 | −3919 | 238 | −3552 | −1112 | −3000 | −3638 | −2516 | −2526 | −3027 | −3772 | −3101 | −3341 | −3418 | −3527 | −3071 | −441 | 4711 | 325 |
| — | −149 | −500 | 233 | 43 | −381 | 399 | 106 | −626 | 210 | −466 | −720 | 275 | 394 | 45 | 96 | 359 | 117 | −369 | −294 | −249 | |
| — | −16 | −7108 | −8150 | −894 | −1115 | −701 | −1378 | * | * | | | | | | | | | | | | |
| 320(M) | −1559 | −1267 | −3829 | −3380 | −1103 | −3357 | −2655 | 805 | −3067 | −64 | 3046 | −3065 | −3326 | −2779 | −3011 | −2591 | −1556 | 2855 | −2312 | −1998 | 326 |
| — | −149 | −500 | 233 | 43 | −381 | 399 | 106 | −626 | 210 | −466 | −720 | 275 | 394 | 45 | 96 | 359 | 117 | −369 | −294 | −249 | |
| — | −16 | −7108 | −8150 | −894 | −1115 | −701 | −1378 | * | * | | | | | | | | | | | | |
| 321(M) | 1225 | −469 | −2256 | −1679 | 1656 | −1926 | −870 | 90 | −1396 | −210 | 2763 | −1424 | −2028 | −1129 | −1411 | −1008 | 712 | 154 | −951 | −586 | 327 |
| — | −149 | −500 | 233 | 43 | −381 | 399 | 106 | −626 | 210 | −466 | −720 | 275 | 394 | 45 | 96 | 359 | 117 | −369 | −294 | −249 | |
| — | −16 | −7108 | −8150 | −894 | −1115 | −701 | −1378 | * | * | | | | | | | | | | | | |
| 322(T) | −738 | −2094 | −84 | 1704 | −2416 | −1495 | −317 | −2135 | 61 | −2127 | −1275 | −163 | −1704 | 1857 | −405 | −613 | 1930 | −1734 | −2331 | −1668 | 328 |
| — | −149 | −500 | 233 | 43 | −381 | 399 | 106 | −626 | 210 | −466 | −720 | 275 | 394 | 45 | 96 | 359 | 117 | −369 | −294 | −249 | |
| — | −16 | −7108 | −8150 | −894 | −1115 | −701 | −1378 | * | * | | | | | | | | | | | | |
| 323(D) | −1746 | −3458 | 3540 | 90 | −3744 | −1650 | −1081 | −3767 | −1381 | −3662 | −3036 | 1386 | −2211 | −772 | −2239 | −1429 | −1850 | −3226 | −3765 | −2789 | 329 |
| — | −149 | −500 | 233 | 43 | −381 | 399 | 106 | −626 | 210 | −466 | −720 | 275 | 394 | 45 | 96 | 359 | 117 | −369 | −294 | −249 | |
| — | −16 | −7108 | −8150 | −894 | −1115 | −701 | −1378 | * | * | | | | | | | | | | | | |
| 324(L) | −2451 | −1983 | −4707 | −4186 | −582 | −4409 | −3259 | 1510 | −3884 | 2778 | 592 | −4069 | −3865 | −3091 | −3590 | −3698 | −2355 | −150 | −2226 | −2214 | 330 |
| — | −149 | −500 | 233 | 43 | −381 | 399 | 106 | −626 | 210 | −466 | −720 | 275 | 394 | 45 | 96 | 359 | 117 | −369 | −294 | −249 | |
| — | −16 | −7108 | −8150 | −894 | −1115 | −701 | −1378 | * | * | | | | | | | | | | | | |
| 325(H) | −2923 | −2573 | −2959 | −2926 | 826 | −3449 | 4553 | −2508 | −2463 | −2054 | −1948 | −2279 | −3499 | −2191 | −2397 | −2761 | −2855 | −2540 | 123 | 2920 | 331 |
| — | −149 | −500 | 233 | 43 | −381 | 399 | 106 | −626 | 210 | −466 | −720 | 275 | 394 | 45 | 96 | 359 | 117 | −369 | −294 | −249 | |
| — | −16 | −7108 | −8150 | −894 | −1115 | −701 | −1378 | * | * | | | | | | | | | | | | |
| 326(K) | 373 | −1957 | −342 | 1025 | −2297 | −1472 | −98 | −2018 | 2111 | −1954 | −1056 | 906 | −1570 | 352 | 685 | −424 | −473 | −1592 | −2105 | −1469 | 332 |
| — | −149 | −500 | 233 | 43 | −381 | 399 | 106 | −626 | 210 | −466 | −720 | 275 | 394 | 45 | 96 | 359 | 117 | −369 | −294 | −249 | |
| — | −16 | −7108 | −8150 | −894 | −1115 | −701 | −1378 | * | * | | | | | | | | | | | | |
| 327(V) | 1739 | −1008 | −3509 | −3043 | −1376 | −3028 | −2406 | 1765 | −2807 | −615 | −334 | −2718 | −3093 | −2585 | −2823 | −2226 | −1263 | 2376 | −2322 | −1931 | 333 |
| — | −149 | −500 | 233 | 43 | −381 | 399 | 106 | −626 | 210 | −466 | −720 | 275 | 394 | 45 | 96 | 359 | 117 | −369 | −294 | −249 | |
| — | −16 | −7108 | −8150 | −894 | −1115 | −701 | −1378 | * | * | | | | | | | | | | | | |
| 328(G) | −2594 | −2690 | −3304 | −3623 | −4328 | 3747 | −3462 | −4761 | −3953 | −4671 | −4212 | −3320 | −3352 | −3748 | −3779 | −2839 | −2981 | −4004 | −3668 | −4222 | 334 |
| — | −149 | −500 | 233 | 43 | −381 | 399 | 106 | −626 | 210 | −466 | −720 | 275 | 394 | 45 | 96 | 359 | 117 | −369 | −294 | −249 | |
| — | −16 | −7108 | −8150 | −894 | −1115 | −701 | −1378 | * | * | | | | | | | | | | | | |
| 329(G) | −2594 | −2690 | −3304 | −3623 | −4328 | 3747 | −3462 | −4761 | −3953 | −4671 | −4212 | −3320 | −3352 | −3748 | −3779 | −2839 | −2981 | −4004 | −3668 | −4222 | 335 |
| — | −149 | −500 | 233 | 43 | −381 | 399 | 106 | −626 | 210 | −466 | −720 | 275 | 394 | 45 | 96 | 359 | 117 | −369 | −294 | −249 | |
| — | −16 | −7108 | −8150 | −894 | −1115 | −701 | −1378 | * | * | | | | | | | | | | | | |
| 330(I) | −1758 | −1302 | −4331 | −3970 | −1756 | −4054 | −3748 | 2976 | −3840 | −603 | −533 | −3731 | −3877 | −3693 | −3914 | −3372 | −1750 | 2505 | −3265 | −2824 | 336 |
| — | −149 | −500 | 233 | 43 | −381 | 399 | 106 | −626 | 210 | −466 | −720 | 275 | 394 | 45 | 96 | 359 | 117 | −369 | −294 | −249 | |
| — | −16 | −7108 | −8150 | −894 | −1115 | −701 | −1378 | * | * | | | | | | | | | | | | |
| 331(P) | −2931 | −2878 | −3420 | −3706 | −4181 | −2925 | −3468 | −4621 | −3859 | −4490 | −4165 | −3491 | 4225 | −3781 | −3695 | −3182 | −3279 | −4087 | −3594 | −4064 | 337 |
| — | −149 | −500 | 233 | 43 | −381 | 399 | 106 | −626 | 210 | −466 | −720 | 275 | 394 | 45 | 96 | 359 | 117 | −369 | −294 | −249 | |
| — | −16 | −7108 | −8150 | −894 | −1115 | −701 | −1378 | * | * | | | | | | | | | | | | |
| 332(Q) | 1795 | −1440 | −730 | −492 | −2453 | 682 | −812 | −2151 | −508 | −2256 | −1426 | −624 | −1796 | 2666 | −901 | −590 | −689 | −1636 | −2510 | −1971 | 338 |
| — | −149 | −500 | 233 | 43 | −381 | 399 | 106 | −626 | 210 | −466 | −720 | 275 | 394 | 45 | 96 | 359 | 117 | −369 | −294 | −249 | |
| — | −16 | −7108 | −8150 | −894 | −1115 | −701 | −1378 | * | * | | | | | | | | | | | | |
| 333(V) | −1771 | −1603 | −3750 | −3689 | −2037 | −3050 | −3231 | 403 | −3479 | −1154 | −1076 | −3246 | −3399 | −3383 | −3437 | −2628 | −1917 | 3536 | −3074 | −2677 | 339 |
| — | −149 | −500 | 233 | 43 | −381 | 399 | 106 | −626 | 210 | −466 | −720 | 275 | 394 | 45 | 96 | 359 | 117 | −369 | −294 | −249 | |
| — | −16 | −7108 | −8150 | −894 | −1115 | −701 | −1378 | * | * | | | | | | | | | | | | |
| 334(M) | −2355 | −1988 | −4343 | −3834 | −504 | −4051 | −2868 | 105 | −3385 | 1451 | 4460 | −3680 | −3671 | −2806 | −3171 | −3327 | −2274 | −474 | −2039 | −1925 | 340 |
| — | −149 | −500 | 233 | 43 | −381 | 399 | 106 | −626 | 210 | −466 | −720 | 275 | 394 | 45 | 96 | 359 | 117 | −369 | −294 | −249 | |
| — | −16 | −7108 | −8150 | −894 | −1115 | −701 | −1378 | * | * | | | | | | | | | | | | |
| 335(K) | −2620 | −2961 | −2461 | −2046 | −3743 | −2791 | −1570 | −3603 | 3784 | −3387 | −2839 | −2048 | −3039 | −1260 | −465 | −2604 | −2536 | −3331 | −3001 | −2988 | 341 |
| — | −149 | −500 | 233 | 43 | −381 | 399 | 106 | −626 | 210 | −466 | −720 | 275 | 394 | 45 | 96 | 359 | 117 | −369 | −294 | −249 | |
| — | −16 | −7108 | −8150 | −894 | −1115 | −701 | −1378 | * | * | | | | | | | | | | | | |
| 336(Y) | −1187 | −974 | −3186 | −2638 | −117 | −2732 | −1255 | 1905 | −2270 | 73 | 1977 | −2217 | −2699 | −1882 | −2144 | −1841 | −1124 | 71 | −907 | 3254 | 342 |
| — | −149 | −500 | 233 | 43 | −381 | 399 | 106 | −626 | 210 | −466 | −720 | 275 | 394 | 45 | 96 | 359 | 117 | −369 | −294 | −249 | |
| — | −16 | −7108 | −8150 | −894 | −1115 | −701 | −1378 | * | * | | | | | | | | | | | | |
| 337(L) | −2871 | −2457 | −4231 | −4103 | −1033 | −3803 | −3165 | −541 | −3734 | 3130 | −31 | −3935 | −3797 | −3286 | −3484 | −3713 | −2869 | −1136 | −2394 | −2220 | 343 |
| — | −149 | −500 | 233 | 43 | −381 | 399 | 106 | −626 | 210 | −466 | −720 | 275 | 394 | 45 | 96 | 359 | 117 | −369 | −294 | −249 | |
| — | −16 | −7108 | −8150 | −894 | −1115 | −701 | −1378 | * | * | | | | | | | | | | | | |
| 338(L) | −2871 | −2457 | −4231 | −4103 | −1033 | −3803 | −3165 | −541 | −3734 | 3130 | −31 | −3935 | −3797 | −3286 | −3484 | −3713 | −2869 | −1136 | −2394 | −2220 | 344 |
| — | −149 | −500 | 233 | 43 | −381 | 399 | 106 | −626 | 210 | −466 | −720 | 275 | 394 | 45 | 96 | 359 | 117 | −369 | −294 | −249 | |
| — | −16 | −7108 | −8150 | −894 | −1115 | −701 | −1378 | * | * | | | | | | | | | | | | |
| 339(K) | −864 | −1785 | −860 | −366 | −2128 | −1763 | −407 | −1612 | 2624 | −1800 | −1045 | 629 | −1900 | −28 | 62 | −851 | −805 | 1127 | −2064 | −1581 | 345 |
| — | −149 | −500 | 233 | 43 | −381 | 399 | 106 | −626 | 210 | −466 | −720 | 275 | 394 | 45 | 96 | 359 | 117 | −369 | −294 | −249 | |
| — | −16 | −7108 | −8150 | −894 | −1115 | −701 | −1378 | * | * | | | | | | | | | | | | |
| 340(N) | 602 | −1686 | −275 | 1008 | −1926 | −1415 | 1528 | −1618 | 244 | −1673 | −815 | 1897 | −1530 | 299 | −244 | −371 | −391 | 322 | −1934 | −1306 | 346 |
| — | −149 | −500 | 233 | 43 | −381 | 399 | 106 | −626 | 210 | −466 | −720 | 275 | 394 | 45 | 96 | 359 | 117 | −369 | −294 | −249 | |
| — | −16 | −7108 | −8150 | −894 | −1115 | −701 | −1378 | * | * | | | | | | | | | | | | |
| 341(G) | −1709 | −2639 | 1362 | −690 | −3785 | 3257 | −1671 | −3805 | −1946 | −3792 | −3137 | −980 | −2480 | −1424 | −2576 | −1630 | −1936 | −3150 | −3628 | −3155 | 347 |
| — | −149 | −500 | 233 | 43 | −381 | 399 | 106 | −626 | 210 | −466 | −720 | 275 | 394 | 45 | 96 | 359 | 117 | −369 | −294 | −249 | |
| — | −16 | −7108 | −8150 | −894 | −1115 | −701 | −1378 | * | * | | | | | | | | | | | | |
| 342(F) | −942 | −799 | −2828 | −2226 | 1797 | −2476 | −1269 | 1109 | 581 | 1793 | 516 | −1952 | −2453 | −1557 | −1815 | −1558 | −875 | 52 | −1138 | −794 | 348 |
| — | −149 | −500 | 233 | 43 | −381 | 399 | 106 | −626 | 210 | −466 | −720 | 275 | 394 | 45 | 96 | 359 | 117 | −369 | −294 | −249 | |
| — | −16 | −7108 | −8150 | −894 | −1115 | −701 | −1378 | * | * | | | | | | | | | | | | |
| 343(L) | −2451 | −1983 | −4707 | −4186 | −582 | −4409 | −3259 | 1510 | −3884 | 2778 | 592 | −4069 | −3865 | −3091 | −3590 | −3698 | −2355 | −150 | −2226 | −2214 | 349 |
| — | −149 | −500 | 233 | 43 | −381 | 399 | 106 | −626 | 210 | −466 | −720 | 275 | 394 | 45 | 96 | 359 | 117 | −369 | −294 | −249 | |
| — | −16 | −7108 | −8150 | −894 | −1115 | −701 | −1378 | * | * | | | | | | | | | | | | |
| 344(H) | −3205 | −3079 | −2723 | −2890 | −2110 | −3046 | 5295 | −4135 | −2617 | −3813 | −3561 | −2886 | −3482 | −2833 | −2620 | −3291 | −3356 | −3895 | −2397 | −1681 | 350 |
| — | −149 | −500 | 233 | 43 | −381 | 399 | 106 | −626 | 210 | −466 | −720 | 275 | 394 | 45 | 96 | 359 | 117 | −369 | −294 | −249 | |
| — | −16 | −7108 | −8150 | −894 | −1115 | −701 | −1378 | * | * | | | | | | | | | | | | |
| 345(G) | −2594 | −2690 | −3304 | −3623 | −4328 | 3747 | −3462 | −4761 | −3953 | −4671 | −4212 | −3320 | −3352 | −3748 | −3779 | −2839 | −2981 | −4004 | −3668 | −4222 | 351 |
| — | −149 | −500 | 233 | 43 | −381 | 399 | 106 | −626 | 210 | −466 | −720 | 275 | 394 | 45 | 96 | 359 | 117 | −369 | −294 | −249 | |
| — | −16 | −7108 | −8150 | −894 | −1115 | −701 | −1378 | * | * | | | | | | | | | | | | |
| 346(D) | −2784 | −3432 | 4016 | −1200 | −4140 | −2466 | −2197 | −4505 | −2621 | −4365 | −3956 | −1551 | −3014 | −2039 | −3232 | −2593 | −2938 | −4046 | −3710 | −3552 | 352 |
| — | −149 | −500 | 233 | 43 | −381 | 399 | 106 | −626 | 210 | −466 | −720 | 275 | 394 | 45 | 96 | 359 | 117 | −369 | −294 | −249 | |
| — | −16 | −7108 | −8150 | −894 | −1115 | −701 | −1378 | * | * | | | | | | | | | | | | |
| 347(C) | 774 | 4452 | −2162 | −1688 | −1962 | −1478 | −1302 | −1474 | −944 | −1796 | −1088 | −1351 | −1979 | −1147 | 1684 | −732 | −719 | −1116 | −2225 | −1881 | 353 |
| — | −149 | −500 | 233 | 43 | −381 | 399 | 106 | −626 | 210 | −466 | −720 | 275 | 394 | 45 | 96 | 359 | 117 | −369 | −294 | −249 | |
| — | −16 | −7108 | −8150 | −894 | −1115 | −701 | −1378 | * | * | | | | | | | | | | | | |
| 348(L) | −2387 | −1922 | −4674 | −4155 | −617 | −4366 | −3250 | 1889 | −3865 | 2650 | 558 | −4023 | −3847 | −3098 | −3586 | −3647 | −2296 | −38 | −2247 | −2224 | 354 |
| — | −149 | −500 | 233 | 43 | −381 | 399 | 106 | −626 | 210 | −466 | −720 | 275 | 394 | 45 | 96 | 359 | 117 | −369 | −294 | −249 | |
| — | −16 | −7108 | −8150 | −894 | −1115 | −701 | −1378 | * | * | | | | | | | | | | | | |
| 349(T) | −1213 | −1674 | −2755 | −2906 | −3163 | −1922 | −2659 | −2698 | −2788 | −3105 | −2612 | −2311 | −2600 | −2708 | −2753 | −1463 | 3819 | −2197 | −3286 | −3156 | 355 |
| — | −149 | −500 | 233 | 43 | −381 | 399 | 106 | −626 | 210 | −466 | −720 | 275 | 394 | 45 | 96 | 359 | 117 | −369 | −294 | −249 | |
| — | −16 | −7108 | −8150 | −894 | −1115 | −701 | −1378 | * | * | | | | | | | | | | | | |
| 350(C) | −1489 | 2972 | −4007 | −3563 | −1524 | −3541 | −2939 | 2612 | −3350 | −617 | −413 | −3224 | −3470 | −3129 | −3335 | −2770 | −1475 | 2269 | −2657 | −2248 | 356 |
| — | −149 | −500 | 233 | 43 | −381 | 399 | 106 | −626 | 210 | −466 | −720 | 275 | 394 | 45 | 96 | 359 | 117 | −369 | −294 | −249 | |
| — | −16 | −7108 | −8150 | −894 | −1115 | −701 | −1378 | * | * | | | | | | | | | | | | |
| 351(T) | −364 | −979 | −2232 | −2250 | −2904 | −1245 | −2090 | −2559 | −2191 | −2881 | −2075 | −1571 | −1964 | −1991 | −2260 | 905 | 3428 | −1762 | −3159 | −2858 | 357 |
| — | −149 | −500 | 233 | 43 | −381 | 399 | 106 | −626 | 210 | −466 | −720 | 275 | 394 | 45 | 96 | 359 | 117 | −369 | −294 | −249 | |
| — | −16 | −7108 | −8150 | −894 | −1115 | −701 | −1378 | * | * | | | | | | | | | | | | |
| 352(G) | −2594 | −2690 | −3304 | −3623 | −4328 | 3747 | −3462 | −4761 | −3953 | −4671 | −4212 | −3320 | −3352 | −3748 | −3779 | −2839 | −2981 | −4004 | −3668 | −4222 | 358 |
| — | −149 | −500 | 233 | 43 | −381 | 399 | 106 | −626 | 210 | −466 | −720 | 275 | 394 | 45 | 96 | 359 | 117 | −369 | −294 | −249 | |
| — | −16 | −7108 | −8150 | −894 | −1115 | −701 | −1378 | * | * | | | | | | | | | | | | |
| 353(K) | −1716 | −2632 | −2004 | −1008 | −3336 | −2379 | −444 | −2764 | 2775 | −2484 | −1756 | −1035 | −2357 | 2151 | 1811 | −1592 | −1477 | −2481 | −2391 | −2172 | 359 |
| — | −149 | −500 | 233 | 43 | −381 | 399 | 106 | −626 | 210 | −466 | −720 | 275 | 394 | 45 | 96 | 359 | 117 | −369 | −294 | −249 | |
| — | −16 | −7108 | −8150 | −894 | −1115 | −701 | −1378 | * | * | | | | | | | | | | | | |
| 354(T) | −1213 | −1674 | −2755 | −2906 | −3163 | −1922 | −2659 | −2698 | −2788 | −3105 | −2612 | −2311 | −2600 | −2708 | −2753 | −1463 | 3819 | −2197 | −3286 | −3156 | 360 |
| — | −149 | −500 | 233 | 43 | −381 | 399 | 106 | −626 | 210 | −466 | −720 | 275 | 394 | 45 | 96 | 359 | 117 | −369 | −294 | −249 | |
| — | −16 | −7108 | −8150 | −894 | −1115 | −701 | −1378 | * | * | | | | | | | | | | | | |
| 355(V) | −1771 | −1339 | −4275 | −3816 | −1235 | −3919 | −3194 | 2139 | −3617 | 1520 | −66 | −3558 | −3681 | −3244 | −3547 | −3164 | −1733 | 2390 | −2634 | −2369 | 361 |
| — | −149 | −500 | 233 | 43 | −381 | 399 | 106 | −626 | 210 | −466 | −720 | 275 | 394 | 45 | 96 | 359 | 117 | −369 | −294 | −249 | |
| — | −16 | −7108 | −8150 | −894 | −1115 | −701 | −1378 | * | * | | | | | | | | | | | | |
| 356(A) | 3438 | −1472 | −2846 | −3040 | −3287 | −1726 | −2735 | −2840 | −3028 | −3257 | −2662 | −2236 | −2447 | −2798 | −2944 | −1216 | −1387 | −2183 | −3405 | −3320 | 362 |
| — | −149 | −500 | 233 | 43 | −381 | 399 | 106 | −626 | 210 | −466 | −720 | 275 | 394 | 45 | 96 | 359 | 117 | −369 | −294 | −249 | |
| — | −16 | −7108 | −8150 | −894 | −1115 | −701 | −1378 | * | * | | | | | | | | | | | | |
| 357(E) | −2641 | −3308 | −896 | 3732 | −3966 | −2458 | −2043 | −4105 | −2128 | −4016 | −3555 | −1531 | −2959 | −1842 | −2560 | −2479 | −2750 | −3722 | −3563 | −3385 | 363 |
| — | −149 | −500 | 233 | 43 | −381 | 399 | 106 | −626 | 210 | −466 | −720 | 275 | 394 | 45 | 96 | 359 | 117 | −369 | −294 | −249 | |
| — | −16 | −7108 | −8150 | −894 | −1115 | −701 | −1378 | * | * | | | | | | | | | | | | |
| 358(N) | −823 | −1917 | −96 | 1188 | −2187 | −1547 | −506 | −1711 | −265 | −1955 | −1191 | 2711 | −1815 | −144 | −747 | −757 | −815 | 1140 | −2297 | −1666 | 364 |
| — | −149 | −500 | 233 | 43 | −381 | 399 | 106 | −626 | 210 | −466 | −720 | 275 | 394 | 45 | 96 | 359 | 117 | −369 | −294 | −249 | |
| — | −16 | −7108 | −8150 | −894 | −1115 | −701 | −1378 | * | * | | | | | | | | | | | | |
| 359(L) | −2153 | −1779 | −4360 | −3884 | −675 | −3965 | −3012 | 392 | −3561 | 2726 | 467 | −3673 | −3662 | −2955 | −3355 | −3239 | −2102 | 1281 | −2207 | −2099 | 365 |
| — | −149 | −500 | 233 | 43 | −381 | 399 | 106 | −626 | 210 | −466 | −720 | 275 | 394 | 45 | 96 | 359 | 117 | −369 | −294 | −249 | |
| — | −16 | −7108 | −8150 | −894 | −1115 | −701 | −1378 | * | * | | | | | | | | | | | | |
| 360(E) | 1136 | −2084 | −175 | 2027 | −2436 | −1510 | −274 | −2147 | 1525 | −2118 | −1254 | −175 | −1692 | 152 | −251 | −593 | −670 | −1736 | −2296 | −1650 | 366 |
| — | −149 | −500 | 233 | 43 | −381 | 399 | 106 | −626 | 210 | −466 | −720 | 275 | 394 | 45 | 96 | 359 | 117 | −369 | −294 | −249 | |
| — | −16 | −7108 | −8150 | −894 | −1115 | −701 | −1378 | * | * | | | | | | | | | | | | |
| 361(H) | 893 | −1761 | 1357 | 214 | −2092 | −1387 | 1862 | −1810 | 229 | −1825 | −942 | −83 | −1527 | 293 | −273 | 640 | 793 | −1409 | −2050 | −1397 | 367 |
| — | −149 | −500 | 233 | 43 | −381 | 399 | 106 | −626 | 210 | −466 | −720 | 275 | 394 | 45 | 96 | 359 | 117 | −369 | −294 | −249 | |
| — | −16 | −7108 | −8150 | −894 | −1115 | −701 | −1378 | * | * | | | | | | | | | | | | |
| 362(I) | 608 | −458 | −2776 | −2176 | 1666 | −2202 | −1113 | 1712 | −1836 | −222 | 338 | −1782 | −2245 | −1512 | −1731 | −1292 | 867 | 1366 | −1036 | −684 | 368 |
| — | −149 | −500 | 233 | 43 | −381 | 399 | 106 | −626 | 210 | −466 | −720 | 275 | 394 | 45 | 96 | 359 | 117 | −369 | −294 | −249 | |
| — | −16 | −7108 | −8150 | −894 | −1115 | −701 | −1378 | * | * | | | | | | | | | | | | |
| 363(P) | −922 | −1912 | 1681 | −141 | −2123 | −1604 | −687 | −1787 | −550 | 187 | −1245 | −427 | 2677 | −363 | −1049 | −882 | −947 | −1524 | −2338 | −1711 | 369 |
| — | −149 | −500 | 233 | 43 | −381 | 399 | 106 | −626 | 210 | −466 | −720 | 275 | 394 | 45 | 96 | 359 | 117 | −369 | −294 | −249 | |
| — | −16 | −7108 | −8150 | −894 | −1115 | −701 | −1378 | * | * | | | | | | | | | | | | |
| 364(D) | −1692 | −3605 | 3364 | 1256 | −3770 | −1599 | −957 | −3700 | −1216 | −3569 | −2909 | 1025 | −2138 | −628 | −2083 | −1346 | −1761 | −3174 | −3765 | −2738 | 370 |
| — | −149 | −500 | 233 | 43 | −381 | 399 | 106 | −626 | 210 | −466 | −720 | 275 | 394 | 45 | 96 | 359 | 117 | −369 | −294 | −249 | |
| — | −16 | −7108 | −8150 | −894 | −1115 | −701 | −1378 | * | * | | | | | | | | | | | | |
| 365(Q) | −877 | −1646 | −633 | 499 | −1610 | −1781 | −505 | −1210 | −63 | 1648 | −649 | −558 | −1931 | 2241 | −360 | −907 | −814 | −1097 | −1882 | −1385 | 371 |
| — | −149 | −500 | 233 | 43 | −381 | 399 | 106 | −626 | 210 | −466 | −720 | 275 | 394 | 45 | 96 | 359 | 117 | −369 | −294 | −249 | |
| — | −16 | −7108 | −8150 | −894 | −1115 | −701 | −1378 | * | * | | | | | | | | | | | | |
| 366(P) | −648 | −2019 | 1139 | 203 | −2354 | −1436 | −285 | −2089 | 29 | −2086 | −1217 | −114 | 1965 | 1445 | −492 | −529 | 1244 | −1672 | −2300 | −1616 | 372 |
| — | −149 | −500 | 233 | 43 | −381 | 399 | 106 | −626 | 210 | −466 | −720 | 275 | 394 | 45 | 96 | 359 | 117 | −369 | −294 | −249 | |
| — | −571 | −7108 | −1646 | −894 | −1115 | −701 | −1378 | * | * | | | | | | | | | | | | |
| 367(R) | −422 | −1009 | −851 | −304 | 1406 | −1496 | −183 | −740 | 147 | −894 | −230 | −440 | 775 | 21 | 2009 | −539 | −381 | −568 | −1136 | −521 | 373 |
| — | −149 | −500 | 233 | 43 | −381 | 399 | 106 | −626 | 210 | −466 | −720 | 275 | 394 | 45 | 96 | 359 | 117 | −369 | −294 | −249 | |
| — | −23 | −6560 | −7602 | −894 | −1115 | −341 | −2249 | * | * | | | | | | | | | | | | |
| 368(D) | 1472 | −1668 | 1835 | −70 | −2356 | −1385 | −511 | −2062 | −246 | −2128 | −1275 | −318 | 1353 | −118 | −746 | −526 | 425 | −1602 | −2380 | −1752 | 374 |
| — | −149 | −500 | 233 | 43 | −381 | 399 | 106 | −626 | 210 | −466 | −720 | 275 | 394 | 45 | 96 | 359 | 117 | −369 | −294 | −249 | |
| — | −16 | −7108 | −8150 | −894 | −1115 | −701 | −1378 | * | * | | | | | | | | | | | | |
| 369(G) | −1044 | −2230 | 2141 | −100 | −3222 | 2291 | −982 | −3045 | −1033 | −3050 | −2258 | −395 | −1985 | −644 | −1669 | 858 | −1207 | −2428 | −3250 | −2493 | 375 |
| — | −149 | −500 | 233 | 43 | −381 | 399 | 106 | −626 | 210 | −466 | −720 | 275 | 394 | 45 | 96 | 359 | 117 | −369 | −294 | −249 | |
| — | −16 | −7108 | −8150 | −894 | −1115 | −701 | −1378 | * | * | | | | | | | | | | | | |
| 370(Q) | −2562 | −2904 | −1886 | −1971 | −3251 | −2661 | −2079 | −3690 | −1565 | −3469 | −3081 | −2107 | −3091 | 4371 | −1665 | −2585 | −2674 | −3411 | −3077 | −2821 | 376 |
| — | −149 | −500 | 233 | 43 | −381 | 399 | 106 | −626 | 210 | −466 | −720 | 275 | 394 | 45 | 96 | 359 | 117 | −369 | −294 | −249 | |
| — | −16 | −7108 | −8150 | −894 | −1115 | −701 | −1378 | * | * | | | | | | | | | | | | |
| 371(D) | −1275 | −2955 | 2862 | 1330 | −3205 | −1556 | −670 | −3029 | 1509 | −2936 | −2141 | −158 | −1955 | −290 | −1213 | −1025 | −1281 | −2554 | −3111 | −2272 | 377 |
| — | −149 | −500 | 233 | 43 | −381 | 399 | 106 | −626 | 210 | −466 | −720 | 275 | 394 | 45 | 96 | 359 | 117 | −369 | −294 | −249 | |
| — | −16 | −7108 | −8150 | −894 | −1115 | −701 | −1378 | * | * | | | | | | | | | | | | |
| 372(V) | −1738 | −1298 | −4281 | −3921 | −1737 | −3979 | −3665 | 1917 | −3774 | −601 | −528 | −3671 | −3834 | −3628 | −3843 | −3293 | −1735 | 3205 | −3215 | −2770 | 378 |
| — | −149 | −500 | 233 | 43 | −381 | 399 | 106 | −626 | 210 | −466 | −720 | 275 | 394 | 45 | 96 | 359 | 117 | −369 | −294 | −249 | |
| — | −16 | −7108 | −8150 | −894 | −1115 | −701 | −1378 | * | * | | | | | | | | | | | | |
| 373(I) | −2091 | −1746 | −3971 | −3840 | −1676 | −3532 | −3289 | 3684 | −3581 | −659 | −693 | −3562 | −3674 | −3445 | −3521 | −3194 | −2146 | 449 | −2877 | −2493 | 379 |
| — | −149 | −500 | 233 | 43 | −381 | 399 | 106 | −626 | 210 | −466 | −720 | 275 | 394 | 45 | 96 | 359 | 117 | −369 | −294 | −249 | |
| — | −16 | −7108 | −8150 | −894 | −1115 | −701 | −1378 | * | * | | | | | | | | | | | | |
| 374(M) | −584 | −1354 | −847 | −246 | −1467 | −1659 | 2505 | −1087 | 212 | −374 | 2571 | −449 | −1729 | 1171 | 1074 | −634 | −507 | −876 | −1617 | −1128 | 380 |
| — | −149 | −500 | 233 | 43 | −381 | 399 | 106 | −626 | 210 | −466 | −720 | 275 | 394 | 45 | 96 | 359 | 117 | −369 | −294 | −249 | |
| — | −16 | −7108 | −8150 | −894 | −1115 | −701 | −1378 | * | * | | | | | | | | | | | | |
| 375(P) | −910 | −2031 | −73 | 1195 | −2792 | −1488 | −794 | −2539 | −629 | −2588 | −1788 | −401 | 3005 | −439 | −1131 | 612 | −1014 | −2050 | −2815 | −2151 | 381 |
| — | −149 | −500 | 233 | 43 | −381 | 399 | 106 | −626 | 210 | −466 | −720 | 275 | 394 | 45 | 96 | 359 | 117 | −369 | −294 | −249 | |
| — | −16 | −7108 | −8150 | −894 | −1115 | −701 | −1378 | * | * | | | | | | | | | | | | |
| 376(W) | −1588 | −1300 | −3783 | −3197 | −329 | −3245 | −1926 | 2071 | −2827 | 1901 | 558 | −2822 | −3072 | −2297 | −2616 | −2381 | −1508 | −111 | 3483 | −1042 | 382 |
| — | −149 | −500 | 233 | 43 | −381 | 399 | 106 | −626 | 210 | −466 | −720 | 275 | 394 | 45 | 96 | 359 | 117 | −369 | −294 | −249 | |
| — | −16 | −7108 | −8150 | −894 | −1115 | −701 | −1378 | * | * | | | | | | | | | | | | |
| 377(E) | −1024 | −2640 | 1844 | 2310 | −2908 | −1498 | −505 | −2711 | −344 | −2636 | −1791 | −107 | −1824 | 1521 | −957 | 207 | −1011 | −2243 | −2817 | −2021 | 383 |
| — | −149 | −500 | 233 | 43 | −381 | 399 | 106 | −626 | 210 | −466 | −720 | 275 | 394 | 45 | 96 | 359 | 117 | −369 | −294 | −249 | |
| — | −16 | −7108 | −8150 | −894 | −1115 | −701 | −1378 | * | * | | | | | | | | | | | | |
| 378(N) | −826 | −2349 | 1089 | 227 | −2651 | −1487 | −341 | −2416 | 1494 | −2346 | −1475 | 2601 | −1724 | 1005 | −522 | −657 | −787 | −1968 | −2511 | −1791 | 384 |
| — | −149 | −500 | 233 | 43 | −381 | 399 | 106 | −626 | 210 | −466 | −720 | 275 | 394 | 45 | 96 | 359 | 117 | −369 | −294 | −249 | |
| — | −16 | −7108 | −8150 | −894 | −1115 | −701 | −1378 | * | * | | | | | | | | | | | | |
| 379(P) | 1932 | −1116 | −2232 | −2301 | −3058 | −1358 | −2206 | −2706 | −2336 | −3009 | −2238 | −1674 | 3274 | −2114 | −2406 | −739 | −914 | −1913 | −3260 | −3019 | 385 |
| — | −149 | −500 | 233 | 43 | −381 | 399 | 106 | −626 | 210 | −466 | −720 | 275 | 394 | 45 | 96 | 359 | 117 | −369 | −294 | −249 | |
| — | −16 | −7108 | −8150 | −894 | −1115 | −701 | −1378 | * | * | | | | | | | | | | | | |
| 380(V) | −914 | −773 | −2713 | −2129 | −712 | −2505 | −1388 | 1452 | 1084 | 1324 | 204 | −1926 | −2507 | −1580 | −1808 | −1591 | −859 | 1713 | −1424 | −1081 | 386 |
| — | −149 | −500 | 233 | 43 | −381 | 399 | 106 | −626 | 210 | −466 | −720 | 275 | 394 | 45 | 96 | 359 | 117 | −369 | −294 | −249 | |
| — | −16 | −7108 | −8150 | −894 | −1115 | −701 | −1378 | * | * | | | | | | | | | | | | |
| 381(Y) | −1484 | −2331 | −1762 | −887 | −2436 | −2254 | −420 | −2325 | 2137 | −2195 | −1475 | −949 | −2258 | −39 | 1983 | −1411 | −1295 | −2075 | −2087 | 2868 | 387 |
| — | −149 | −500 | 233 | 43 | −381 | 399 | 106 | −626 | 210 | −466 | −720 | 275 | 394 | 45 | 96 | 359 | 117 | −369 | −294 | −249 | |
| — | −16 | −7108 | −8150 | −894 | −1115 | −701 | −1378 | * | * | | | | | | | | | | | | |
| 382(E) | 1256 | −1890 | −206 | 1353 | −2196 | −1401 | −89 | −1930 | 812 | −1898 | −996 | −45 | 547 | 1252 | −162 | −356 | −414 | −1507 | −2083 | −1416 | 388 |
| — | −149 | −500 | 233 | 43 | −381 | 399 | 106 | −626 | 210 | −466 | −720 | 275 | 394 | 45 | 96 | 359 | 117 | −369 | −294 | −249 | |
| — | −16 | −7108 | −8150 | −894 | −1115 | −701 | −1378 | * | * | | | | | | | | | | | | |
| 383(Q) | −752 | −2272 | 1586 | 1407 | −2561 | −1448 | −308 | −2329 | −23 | −2276 | −1396 | −71 | −1677 | 1749 | −577 | −590 | 1569 | −1881 | −2459 | −1727 | 389 |
| — | −149 | −500 | 233 | 43 | −381 | 399 | 106 | −626 | 210 | −466 | −720 | 275 | 394 | 45 | 96 | 359 | 117 | −369 | −294 | −249 | |
| — | −16 | −7108 | −8150 | −894 | −1115 | −701 | −1378 | * | * | | | | | | | | | | | | |
| 384(G) | −2594 | −2690 | −3304 | −3623 | −4328 | 3747 | −3462 | −4761 | −3953 | −4671 | −4212 | −3320 | −3352 | −3748 | −3779 | −2839 | −2981 | −4004 | −3668 | −4222 | 390 |
| — | −149 | −500 | 233 | 43 | −381 | 399 | 106 | −626 | 210 | −466 | −720 | 275 | 394 | 45 | 96 | 359 | 117 | −369 | −294 | −249 | |
| — | −16 | −7108 | −8150 | −894 | −1115 | −701 | −1378 | * | * | | | | | | | | | | | | |
| 385(H) | −964 | −2089 | −200 | −136 | −2264 | −1600 | 3833 | −2320 | −296 | −2338 | −1558 | 1362 | 1479 | −276 | −699 | −881 | −992 | −1924 | −2364 | −1652 | 391 |
| — | −149 | −500 | 233 | 43 | −381 | 399 | 106 | −626 | 210 | −466 | −720 | 275 | 394 | 45 | 96 | 359 | 117 | −369 | −294 | −249 | |
| — | −16 | −7108 | −8150 | −894 | −1115 | −701 | −1378 | * | * | | | | | | | | | | | | |
| 386(L) | −2451 | −1983 | −4707 | −4186 | −582 | −4409 | −3259 | 1510 | −3884 | 2778 | 592 | −4069 | −3865 | −3091 | −3590 | −3698 | −2355 | −150 | −2226 | −2214 | 392 |
| — | −149 | −500 | 233 | 43 | −381 | 399 | 106 | −626 | 210 | −466 | −720 | 275 | 394 | 45 | 96 | 359 | 117 | −369 | −294 | −249 | |
| — | −16 | −7108 | −8150 | −894 | −1115 | −701 | −1378 | * | * | | | | | | | | | | | | |
| 387(Q) | 1643 | −1017 | −1196 | −721 | −1189 | −1714 | −668 | 1336 | −497 | −907 | −297 | −823 | −1893 | 2044 | −794 | −784 | −569 | −339 | −1579 | −1135 | 393 |
| — | −149 | −500 | 233 | 43 | −381 | 399 | 106 | −626 | 210 | −466 | −720 | 275 | 394 | 45 | 96 | 359 | 117 | −369 | −294 | −249 | |
| — | −16 | −7108 | −8150 | −894 | −1115 | −701 | −1378 | * | * | | | | | | | | | | | | |
| 388(I) | −1760 | −1308 | −4323 | −3961 | −1730 | −4039 | −3721 | 3156 | −3825 | −575 | −512 | −3720 | −3867 | −3669 | −3893 | −3356 | −1753 | 2241 | −3236 | −2802 | 394 |
| — | −149 | −500 | 233 | 43 | −381 | 399 | 106 | −626 | 210 | −466 | −720 | 275 | 394 | 45 | 96 | 359 | 117 | −369 | −294 | −249 | |
| — | −16 | −7108 | −8150 | −894 | −1115 | −701 | −1378 | * | * | | | | | | | | | | | | |
| 389(L) | −2871 | −2457 | −4231 | −4103 | −1033 | −3803 | −3165 | −541 | −3734 | 3130 | −31 | −3935 | −3797 | −3286 | −3484 | −3713 | −2869 | −1136 | −2394 | −2220 | 395 |
| — | −149 | −500 | 233 | 43 | −381 | 399 | 106 | −626 | 210 | −466 | −720 | 275 | 394 | 45 | 96 | 359 | 117 | −369 | −294 | −249 | |
| — | −16 | −7108 | −8150 | −894 | −1115 | −701 | −1378 | * | * | | | | | | | | | | | | |
| 390(K) | −1259 | −2115 | −1267 | −676 | −970 | −2105 | 1794 | −2040 | 2549 | −1955 | −1282 | −808 | −2165 | −167 | 114 | −1192 | −1140 | −1801 | −1301 | 2517 | 396 |
| — | −149 | −500 | 233 | 43 | −381 | 399 | 106 | −626 | 210 | −466 | −720 | 275 | 394 | 45 | 96 | 359 | 117 | −369 | −294 | −249 | |
| — | −16 | −7108 | −8150 | −894 | −1115 | −701 | −1378 | * | * | | | | | | | | | | | | |
| 391(G) | −2594 | −2690 | −3304 | −3623 | −4328 | 3747 | −3462 | −4761 | −3953 | −4671 | −4212 | −3320 | −3352 | −3748 | −3779 | −2839 | −2981 | −4004 | −3668 | 4222 | 397 |
| — | −149 | −500 | 233 | 43 | −381 | 399 | 106 | −626 | 210 | −466 | −720 | 275 | 394 | 45 | 96 | 359 | 117 | −369 | −294 | −249 | |
| — | −16 | −7108 | −8150 | −894 | −1115 | −701 | −1378 | * | * | | | | | | | | | | | | |
| 392(N) | −2171 | −2655 | −1458 | −1748 | −3334 | −2364 | −2267 | −3943 | −2365 | −3936 | −3437 | 4205 | −2932 | −2205 | −2608 | −2224 | −2439 | −3392 | −3253 | −2909 | 398 |
| — | −149 | −500 | 233 | 43 | −381 | 399 | 106 | −626 | 210 | −466 | −720 | 275 | 394 | 45 | 96 | 359 | 117 | −369 | −294 | −249 | |
| — | −16 | −7108 | −8150 | −894 | −1115 | −701 | −1378 | * | * | | | | | | | | | | | | |
| 393(L) | −2871 | −2457 | −4231 | −4103 | −1033 | −3803 | −3165 | −541 | −3734 | 3130 | −31 | −3935 | −3797 | −3286 | −3484 | −3713 | −2869 | −1136 | −2394 | −2220 | 399 |
| — | −149 | −500 | 233 | 43 | −381 | 399 | 106 | −626 | 210 | −466 | −720 | 275 | 394 | 45 | 96 | 359 | 117 | −369 | −294 | −249 | |
| — | −16 | −7108 | −8150 | −894 | −1115 | −701 | −1378 | * | * | | | | | | | | | | | | |
| 394(A) | 3121 | −934 | −2489 | −2561 | −3081 | −1203 | −2295 | −2766 | −2533 | −3080 | −2234 | −1669 | −1953 | −2234 | −2533 | 936 | −746 | −1844 | −3331 | −3090 | 400 |
| — | −149 | −500 | 233 | 43 | −381 | 399 | 106 | −626 | 210 | −466 | −720 | 275 | 394 | 45 | 96 | 359 | 117 | −369 | −294 | −249 | |
| — | −16 | −7108 | −8150 | −894 | −1115 | −701 | −1378 | * | * | | | | | | | | | | | | |
| 395(E) | −522 | −1773 | −240 | 1676 | −2248 | −1396 | −289 | −1968 | 50 | −1989 | −1115 | −174 | 1198 | 131 | −448 | 1226 | 677 | −1538 | −2214 | −1565 | 401 |
| — | −149 | −500 | 233 | 43 | −381 | 399 | 106 | −626 | 210 | −466 | −720 | 275 | 394 | 45 | 96 | 359 | 117 | −369 | −294 | −249 | |
| — | −16 | −7108 | −8150 | −894 | −1115 | −701 | −1378 | * | * | | | | | | | | | | | | |
| 396(E) | −1481 | −3230 | 1425 | 2936 | −3481 | 751 | −843 | −3354 | −954 | −3256 | −2520 | −187 | −2057 | −492 | −1711 | −1193 | −1527 | −2852 | −3445 | −2523 | 402 |
| — | −149 | −500 | 233 | 43 | −381 | 399 | 106 | −626 | 210 | −466 | −720 | 275 | 394 | 45 | 96 | 359 | 117 | −369 | −294 | −249 | |
| — | −16 | −7108 | −8150 | −894 | −1115 | −701 | −1378 | * | * | | | | | | | | | | | | |
| 397(G) | −2594 | −2690 | −3304 | −3623 | −4328 | 3747 | −3462 | −4761 | −3953 | −4671 | −4212 | −3320 | −3352 | −3748 | −3779 | −2839 | −2981 | −4004 | −3668 | 4222 | 403 |
| — | −149 | −500 | 233 | 43 | −381 | 399 | 106 | −626 | 210 | −466 | −720 | 275 | 394 | 45 | 96 | 359 | 117 | −369 | −294 | −249 | |
| — | −16 | −7108 | −8150 | −894 | −1115 | −701 | −1378 | * | * | | | | | | | | | | | | |
| 398(A) | 2847 | −932 | −2454 | −2477 | −3066 | −1198 | −2236 | −2763 | −2439 | −3057 | −2202 | −1635 | −1940 | −2152 | −2471 | 1777 | −731 | −1840 | −3306 | −3056 | 404 |
| — | −149 | −500 | 233 | 43 | −381 | 399 | 106 | −626 | 210 | −466 | −720 | 275 | 394 | 45 | 96 | 359 | 117 | −369 | −294 | −249 | |
| — | −16 | −7108 | −8150 | −894 | −1115 | −701 | −1378 | * | * | | | | | | | | | | | | |
| 399(V) | −1771 | −1603 | −3750 | −3689 | −2037 | −3050 | −3231 | 403 | −3479 | −1154 | −1076 | −3246 | −3399 | −3383 | −3437 | −2628 | −1917 | 3536 | −3074 | −2677 | 405 |
| — | −149 | −500 | 233 | 43 | −381 | 399 | 106 | −626 | 210 | −466 | −720 | 275 | 394 | 45 | 96 | 359 | 117 | −369 | −294 | −249 | |
| — | −16 | −7108 | −8150 | −894 | −1115 | −701 | −1378 | * | * | | | | | | | | | | | | |
| 400(A) | 3438 | −1472 | −2846 | −3040 | −3287 | −1726 | −2735 | −2840 | −3028 | −3257 | −2662 | −2236 | −2447 | −2798 | −2944 | −1216 | −1387 | −2183 | −3405 | −3320 | 406 |
| — | −149 | −500 | 233 | 43 | −381 | 399 | 106 | −626 | 210 | −466 | −720 | 275 | 394 | 45 | 96 | 359 | 117 | −369 | −294 | −249 | |
| — | −16 | −7108 | −8150 | −894 | −1115 | −701 | −1378 | * | * | | | | | | | | | | | | |
| 401(K) | −2620 | −2961 | −2461 | −2046 | −3743 | −2791 | −1570 | −3603 | 3784 | −3387 | −2839 | −2048 | −3039 | −1260 | −465 | −2604 | −2536 | −3331 | −3001 | −2988 | 407 |
| — | −149 | −500 | 233 | 43 | −381 | 399 | 106 | −626 | 210 | −466 | −720 | 275 | 394 | 45 | 96 | 359 | 117 | −369 | −294 | −249 | |
| — | −16 | −7108 | −8150 | −894 | −1115 | −701 | −1378 | * | * | | | | | | | | | | | | |
| 402(I) | −1761 | −1312 | −4317 | −3954 | −1713 | −4027 | −3703 | 3225 | −3814 | −556 | −498 | −3712 | −3859 | −3653 | −3877 | −3344 | −1754 | 2110 | −3216 | −2787 | 408 |
| — | −149 | −500 | 233 | 43 | −381 | 399 | 106 | −626 | 210 | −466 | −720 | 275 | 394 | 45 | 96 | 359 | 117 | −369 | −294 | −249 | |
| — | −16 | −7108 | −8150 | −894 | −1115 | −701 | −1378 | * | * | | | | | | | | | | | | |
| 403(S) | −348 | −981 | −2200 | −2194 | −2989 | −1227 | −2073 | −2686 | −2157 | −2970 | −2136 | −1541 | −1946 | −1946 | −2253 | 3060 | 1398 | −1824 | −3217 | −2916 | 409 |
| — | −149 | −500 | 233 | 43 | −381 | 399 | 106 | −626 | 210 | −466 | −720 | 275 | 394 | 45 | 96 | 359 | 117 | −369 | −294 | −249 | |
| — | −16 | −7108 | −8150 | −894 | −1115 | −701 | −1378 | * | * | | | | | | | | | | | | |
| 404(G) | −2594 | −2690 | −3304 | −3623 | −4328 | 3747 | −3462 | −4761 | −3953 | −4671 | −4212 | −3320 | −3352 | −3748 | −3779 | −2839 | −2981 | −4004 | −3668 | −4222 | 410 |
| — | −149 | −500 | 233 | 43 | −381 | 399 | 106 | −626 | 210 | −466 | −720 | 275 | 394 | 45 | 96 | 359 | 117 | −369 | −294 | −249 | |
| — | −16 | −7108 | −8150 | −894 | −1115 | −701 | −1378 | * | * | | | | | | | | | | | | |
| 405(V) | −917 | −809 | −2556 | −1976 | −827 | −2491 | −1367 | 1339 | 1455 | 721 | 94 | −1841 | −2501 | −1487 | −1710 | −1570 | −863 | 2038 | −1514 | −1151 | 411 |
| — | −149 | −500 | 233 | 43 | −381 | 399 | 106 | −626 | 210 | −466 | −720 | 275 | 394 | 45 | 96 | 359 | 117 | −369 | −294 | −249 | |
| — | −16 | −7108 | −8150 | −894 | −1115 | −701 | −1378 | * | * | | | | | | | | | | | | |
| 406(K) | −1386 | −2643 | −447 | 1824 | −3108 | −1893 | −570 | −2762 | 2860 | −2616 | −1848 | −552 | −2117 | −166 | −3 | −1217 | −1300 | −2388 | −2647 | −2154 | 412 |
| — | −149 | −500 | 233 | 43 | −381 | 399 | 106 | −626 | 210 | −466 | −720 | 275 | 394 | 45 | 96 | 359 | 117 | −369 | −294 | −249 | |
| — | −16 | −7108 | −8150 | −894 | −1115 | −701 | −1378 | * | * | | | | | | | | | | | | |
| 407(N) | −537 | −1563 | −449 | −36 | −1889 | 1143 | −307 | −1529 | 932 | −1655 | −844 | 1794 | −1658 | 73 | −356 | −518 | −516 | 924 | −1962 | −1392 | 413 |
| — | −149 | −500 | 233 | 43 | −381 | 399 | 106 | −626 | 210 | −466 | −720 | 275 | 394 | 45 | 96 | 359 | 117 | −369 | −294 | −249 | |
| — | −16 | −7108 | −8150 | −894 | −1115 | −701 | −1378 | * | * | | | | | | | | | | | | |
| 408(P) | −894 | −2181 | −369 | 1705 | −2576 | −1650 | −357 | −2268 | 243 | −2210 | −1375 | −330 | 2093 | 63 | 1619 | −774 | −835 | −1876 | −2347 | −1769 | 414 |
| — | −149 | −500 | 233 | 43 | −381 | 399 | 106 | −626 | 210 | −466 | −720 | 275 | 394 | 45 | 96 | 359 | 117 | −369 | −294 | −249 | |
| — | −16 | −7108 | −8150 | −894 | −1115 | −701 | −1378 | * | * | | | | | | | | | | | | |
| 409(V) | −419 | −634 | −1376 | −807 | 1053 | −1737 | −499 | −198 | −623 | −505 | 178 | 600 | −1807 | −475 | 475 | 313 | −360 | 1389 | −1016 | 1303 | 415 |
| — | −149 | −500 | 233 | 43 | −381 | 399 | 106 | −626 | 210 | −466 | −720 | 275 | 394 | 45 | 96 | 359 | 117 | −369 | −294 | −249 | |
| — | −16 | −7108 | −8150 | −894 | −1115 | −701 | −1378 | * | * | | | | | | | | | | | | |
| 410(I) | −1282 | −1082 | −3022 | −2555 | 2426 | −2683 | 1767 | 2555 | −2191 | −443 | −88 | −2038 | −2692 | −1794 | −2075 | −1793 | −1220 | −317 | −361 | 552 | 416 |
| — | −149 | −500 | 233 | 43 | −381 | 399 | 106 | −626 | 210 | −466 | −720 | 275 | 394 | 45 | 96 | 359 | 117 | −369 | −294 | −249 | |
| — | −16 | −7108 | −8150 | −894 | −1115 | −701 | −1378 | * | * | | | | | | | | | | | | |
| 411(T) | −499 | −1595 | −431 | 966 | −1830 | −1487 | −185 | −1449 | 1092 | −1574 | −754 | −207 | −1601 | 213 | −206 | −458 | 2067 | 159 | −1877 | −1296 | 417 |
| — | −149 | −500 | 233 | 43 | −381 | 399 | 106 | −626 | 210 | −466 | −720 | 275 | 394 | 45 | 96 | 359 | 117 | −369 | −294 | −249 | |
| — | −16 | −7108 | −8150 | −894 | −1115 | −701 | −1378 | * | * | | | | | | | | | | | | |
| 412(G) | −2594 | −2690 | −3304 | −3623 | −4328 | 3747 | −3462 | −4761 | −3953 | −4671 | −4212 | −3320 | −3352 | −3748 | −3779 | −2839 | −2981 | −4004 | −3668 | −4222 | 418 |
| — | −149 | −500 | 233 | 43 | −381 | 399 | 106 | −626 | 210 | −466 | −720 | 275 | 394 | 45 | 96 | 359 | 117 | −369 | −294 | −249 | |
| — | −16 | −7108 | −8150 | −894 | −1115 | −701 | −1378 | * | * | | | | | | | | | | | | |
| 413(P) | −632 | −1230 | −2074 | −2144 | −2996 | −1453 | −2116 | −2631 | −2128 | −2928 | −2213 | −1658 | 3610 | −2006 | −2221 | −852 | 1302 | −1931 | −3185 | −2917 | 419 |
| — | −149 | −500 | 233 | 43 | −381 | 399 | 106 | −626 | 210 | −466 | −720 | 275 | 394 | 45 | 96 | 359 | 117 | −369 | −294 | −249 | |
| — | −16 | −7108 | −8150 | −894 | −1115 | −701 | −1378 | * | * | | | | | | | | | | | | |
| 414(A) | 3438 | −1472 | −2846 | −3040 | −3287 | −1726 | −2735 | −2840 | −3028 | −3257 | −2662 | −2236 | −2447 | −2798 | −2944 | −1216 | −1387 | −2183 | −3405 | −3320 | 420 |
| — | −149 | −500 | 233 | 43 | −381 | 399 | 106 | −626 | 210 | −466 | −720 | 275 | 394 | 45 | 96 | 359 | 117 | −369 | −294 | −249 | |
| — | −16 | −7108 | −8150 | −894 | −1115 | −701 | −1378 | * | * | | | | | | | | | | | | |
| 415(R) | −1454 | −2316 | −1780 | −878 | −2834 | −2232 | −428 | −2292 | 2281 | −2200 | −1473 | −940 | −2240 | −17 | 2627 | −1386 | −1270 | 588 | −2249 | −1960 | 421 |
| — | −149 | −500 | 233 | 43 | −381 | 399 | 106 | −626 | 210 | −466 | −720 | 275 | 394 | 45 | 96 | 359 | 117 | −369 | −294 | −249 | |
| — | −16 | −7108 | −8150 | −894 | −1115 | −701 | −1378 | * | * | | | | | | | | | | | | |
| 416(V) | −1771 | −1603 | −3750 | −3689 | −2037 | −3050 | −3231 | 403 | −3479 | −1154 | −1076 | −3246 | −3399 | −3383 | −3437 | −2628 | −1917 | 3536 | −3074 | −2677 | 422 |
| — | −149 | −500 | 233 | 43 | −381 | 399 | 106 | −626 | 210 | −466 | −720 | 275 | 394 | 45 | 96 | 359 | 117 | −369 | −294 | −249 | |
| — | −16 | −7108 | −8150 | −894 | −1115 | −701 | −1378 | * | * | | | | | | | | | | | | |
| 417(F) | −3342 | −2776 | −4026 | −4232 | 4354 | −3545 | −1431 | −2315 | −4038 | −1801 | −1900 | −3299 | −3780 | −3350 | −3645 | −3490 | −3420 | −2566 | −739 | 349 | 423 |
| — | −149 | −500 | 233 | 43 | −381 | 399 | 106 | −626 | 210 | −466 | −720 | 275 | 394 | 45 | 96 | 359 | 117 | −369 | −294 | −249 | |
| — | −16 | −7108 | −8150 | −894 | −1115 | −701 | −1378 | * | * | | | | | | | | | | | | |
| 418(D) | −1572 | −3426 | 2573 | 2447 | −3613 | −1583 | −879 | −3513 | −1050 | −3393 | −2684 | 1292 | −2085 | −535 | −1855 | −1253 | −1623 | −3000 | −3585 | −2609 | 424 |
| — | −149 | −500 | 233 | 43 | −381 | 399 | 106 | −626 | 210 | −466 | −720 | 275 | 394 | 45 | 96 | 359 | 117 | −369 | −294 | −249 | |
| — | −16 | −7108 | −8150 | −894 | −1115 | −701 | −1378 | * | * | | | | | | | | | | | | |
| 419(S) | −879 | −1989 | 1498 | −177 | −3045 | 1600 | −939 | −2843 | −904 | −2867 | −2046 | −438 | −1922 | −591 | −1483 | 2171 | −1044 | −2226 | −3072 | −2372 | 425 |
| — | −149 | −500 | 233 | 43 | −381 | 399 | 106 | −626 | 210 | −466 | −720 | 275 | 394 | 45 | 96 | 359 | 117 | −369 | −294 | −249 | |
| — | −16 | −7108 | −8150 | −894 | −1115 | −701 | −1378 | * | * | | | | | | | | | | | | |
| 420(E) | −2641 | −3308 | −896 | 3732 | −3966 | −2458 | −2043 | −4105 | −2128 | −4016 | −3555 | −1531 | −2959 | −1842 | −2560 | −2479 | −2750 | −3722 | −3563 | −3385 | 426 |
| — | −149 | −500 | 233 | 43 | −381 | 399 | 106 | −626 | 210 | −466 | −720 | 275 | 394 | 45 | 96 | 359 | 117 | −369 | −294 | −249 | |
| — | −16 | −7108 | −8150 | −894 | −1115 | −701 | −1378 | * | * | | | | | | | | | | | | |
| 421(Q) | −705 | −1925 | −199 | 2112 | 917 | −1534 | −288 | −1824 | 42 | −1842 | −1054 | −210 | −1709 | 2163 | −420 | −611 | −656 | −1502 | −1997 | −1291 | 427 |
| — | −149 | −500 | 233 | 43 | −381 | 399 | 106 | −626 | 210 | −466 | −720 | 275 | 394 | 45 | 96 | 359 | 117 | −369 | −294 | −249 | |
| — | −16 | −7108 | −8150 | −894 | −1115 | −701 | −1378 | * | * | | | | | | | | | | | | |
| 422(H) | −569 | −2048 | 1450 | 1526 | −2349 | −1405 | 1830 | −2103 | 181 | −2058 | −1157 | −37 | −1569 | 272 | −349 | 713 | 620 | −1662 | −2240 | −1537 | 428 |
| — | −149 | −500 | 233 | 43 | −381 | 399 | 106 | −626 | 210 | −466 | −720 | 275 | 394 | 45 | 96 | 359 | 117 | −369 | −294 | −249 | |
| — | −16 | −7108 | −8150 | −894 | −1115 | −701 | −1378 | * | * | | | | | | | | | | | | |
| 423(C) | 1626 | 2878 | −2671 | −2107 | 1264 | −1968 | −1091 | 233 | −1777 | −334 | 250 | −1672 | −2128 | −1459 | −1691 | −1096 | −529 | 1209 | −1066 | −704 | 429 |
| — | −149 | −500 | 233 | 43 | −381 | 399 | 106 | −626 | 210 | −466 | −720 | 275 | 394 | 45 | 96 | 359 | 117 | −369 | −294 | −249 | |
| — | −16 | −7108 | −8150 | −894 | −1115 | −701 | −1378 | * | * | | | | | | | | | | | | |
| 424(M) | −2042 | −1634 | −4379 | −3826 | −659 | −3976 | −2899 | 2765 | −3546 | 1204 | 3085 | −3605 | −3604 | −2896 | −3318 | −3183 | −1961 | 195 | −2135 | −2058 | 430 |
| — | −149 | −500 | 233 | 43 | −381 | 399 | 106 | −626 | 210 | −466 | −720 | 275 | 394 | 45 | 96 | 359 | 117 | −369 | −294 | −249 | |
| — | −16 | −7108 | −8150 | −894 | −1115 | −701 | −1378 | * | * | | | | | | | | | | | | |
| 425(E) | 412 | −2447 | 1356 | 2379 | −2747 | −1477 | −445 | −2527 | −243 | −2477 | −1622 | −107 | 855 | −36 | −831 | −730 | −894 | −2073 | −2668 | −1906 | 431 |
| — | −149 | −500 | 233 | 43 | −381 | 399 | 106 | −626 | 210 | −466 | −720 | 275 | 394 | 45 | 96 | 359 | 117 | −369 | −294 | −249 | |
| — | −16 | −7108 | −8150 | −894 | −1115 | −701 | −1378 | * | * | | | | | | | | | | | | |
| 426(A) | 2822 | −1031 | −2418 | −2539 | −3226 | 1898 | −2364 | −2941 | −2626 | −3229 | −2379 | −1722 | −2026 | −2302 | −2634 | −654 | −848 | −1983 | −3415 | −3226 | 432 |
| — | −149 | −500 | 233 | 43 | −381 | 399 | 106 | −626 | 210 | −466 | −720 | 275 | 394 | 45 | 96 | 359 | 117 | −369 | −294 | −249 | |
| — | −16 | −7108 | −8150 | −894 | −1115 | −701 | −1378 | * | * | | | | | | | | | | | | |
| 427(I) | −1772 | −1325 | −4307 | −3877 | −1405 | −3993 | −3383 | 2935 | −3705 | 820 | −217 | −3632 | −3761 | −3400 | −3682 | −3260 | −1742 | 2033 | −2838 | −2525 | 433 |
| — | −149 | −500 | 233 | 43 | −381 | 399 | 106 | −626 | 210 | −466 | −720 | 275 | 394 | 45 | 96 | 359 | 117 | −369 | −294 | −249 | |
| — | −16 | −7108 | −8150 | −894 | −1115 | −701 | −1378 | * | * | | | | | | | | | | | | |
| 428(L) | −875 | −1634 | −575 | 959 | −1581 | −1769 | −525 | −1179 | −135 | 1884 | −625 | −547 | −1931 | 1405 | −450 | −909 | −816 | −1074 | −1883 | −1383 | 434 |
| — | −149 | −500 | 233 | 43 | −381 | 399 | 106 | −626 | 210 | −466 | −720 | 275 | 394 | 45 | 96 | 359 | 117 | −369 | −294 | −249 | |
| — | −16 | −7108 | −8150 | −894 | −1115 | −701 | −1378 | * | * | | | | | | | | | | | | |
| 429(A) | 1705 | −1826 | −180 | 949 | −2318 | −1410 | −359 | −2041 | −53 | −2067 | −1204 | 1001 | −1652 | 52 | −561 | 1232 | −595 | −1609 | −2298 | −1643 | 435 |
| — | −149 | −500 | 233 | 43 | −381 | 399 | 106 | −626 | 210 | −466 | −720 | 275 | 394 | 45 | 96 | 359 | 117 | −369 | −294 | −249 | |
| — | −16 | −7108 | −8150 | −894 | −1115 | −701 | −1378 | * | * | | | | | | | | | | | | |
| 430(D) | −1074 | −2458 | 2381 | 60 | −2921 | 1927 | −658 | −2710 | −463 | −2675 | −1860 | −271 | −1918 | −276 | 866 | −915 | −1100 | −2245 | −2845 | −2124 | 436 |
| — | −149 | −500 | 233 | 43 | −381 | 399 | 106 | −626 | 210 | −466 | −720 | 275 | 394 | 45 | 96 | 359 | 117 | −369 | −294 | −249 | |
| — | −16 | −7108 | −8150 | −894 | −1115 | −701 | −1378 | * | * | | | | | | | | | | | | |
| 431(K) | −688 | −2117 | 785 | 888 | −2469 | −1529 | −187 | −2189 | 2380 | −2106 | −1221 | −162 | −1661 | 256 | 1134 | −553 | −619 | −1760 | −2240 | −1607 | 437 |
| — | −149 | −500 | 233 | 43 | −381 | 399 | 106 | −626 | 210 | −466 | −720 | 275 | 394 | 45 | 96 | 359 | 117 | −369 | −294 | −249 | |
| — | −16 | −7108 | −8150 | −894 | −1115 | −701 | −1378 | * | * | | | | | | | | | | | | |
| 432(I) | −2019 | −1582 | −4380 | −3941 | −1000 | −4086 | −3253 | 3295 | −3671 | 1100 | 145 | −3736 | −3783 | −3222 | −3556 | −3378 | −1976 | 657 | −2517 | −2289 | 438 |
| — | −149 | −500 | 233 | 43 | −381 | 399 | 106 | −626 | 210 | −466 | −720 | 275 | 394 | 45 | 96 | 359 | 117 | −369 | −294 | −249 | |
| — | −16 | −7108 | −8150 | −894 | −1115 | −701 | −1378 | * | * | | | | | | | | | | | | |
| 433(Q) | −490 | −1797 | −369 | 171 | −2078 | −1457 | 1762 | −1779 | 1157 | −1780 | −905 | 1165 | −1550 | 1798 | −48 | −396 | −422 | 725 | −1986 | −1366 | 439 |
| — | −149 | −500 | 233 | 43 | −381 | 399 | 106 | −626 | 210 | −466 | −720 | 275 | 394 | 45 | 96 | 359 | 117 | −369 | −294 | −249 | |
| — | −16 | −7108 | −8150 | −894 | −1115 | −701 | −1378 | * | * | | | | | | | | | | | | |
| 434(A) | 1954 | −1836 | 1733 | −180 | −2714 | −1429 | −806 | −2438 | −679 | −2518 | −1698 | −430 | 1775 | −448 | −1211 | −736 | −894 | −1923 | −2765 | −2117 | 440 |
| — | −149 | −500 | 233 | 43 | −381 | 399 | 106 | −626 | 210 | −466 | −720 | 275 | 394 | 45 | 96 | 359 | 117 | −369 | −294 | −249 | |
| — | −16 | −7108 | −8150 | −894 | −1115 | −701 | −1378 | * | * | | | | | | | | | | | | |
| 435(G) | −2594 | −2690 | −3304 | −3623 | −4328 | 3747 | −3462 | −4761 | −3953 | −4671 | −4212 | −3320 | −3352 | −3748 | −3779 | −2839 | −2981 | −4004 | −3668 | −4222 | 441 |
| — | −149 | −500 | 233 | 43 | −381 | 399 | 106 | −626 | 210 | −466 | −720 | 275 | 394 | 45 | 96 | 359 | 117 | −369 | −294 | −249 | |
| — | −16 | −7108 | −8150 | −894 | −1115 | −701 | −1378 | * | * | | | | | | | | | | | | |
| 436(D) | −1736 | −3455 | 3490 | 97 | −3737 | −1646 | −1070 | −3753 | −1363 | −3647 | −3016 | 1602 | −2204 | −760 | −2218 | −1420 | −1838 | −3213 | −3756 | −2780 | 442 |
| — | −149 | −500 | 233 | 43 | −381 | 399 | 106 | −626 | 210 | −466 | −720 | 275 | 394 | 45 | 96 | 359 | 117 | −369 | −294 | −249 | |
| — | −16 | −7108 | −8150 | −894 | −1115 | −701 | −1378 | * | * | | | | | | | | | | | | |
| 437(V) | −1721 | −1302 | −4229 | −3874 | −1705 | −3894 | −3582 | 1607 | −3706 | −582 | −513 | −3610 | −3786 | −3559 | −3767 | −3209 | −1725 | 3294 | −3158 | −2712 | 443 |
| — | −149 | −500 | 233 | 43 | −381 | 399 | 106 | −626 | 210 | −466 | −720 | 275 | 394 | 45 | 96 | 359 | 117 | −369 | −294 | −249 | |
| — | −16 | −7108 | −8150 | −894 | −1115 | −701 | −1378 | * | * | | | | | | | | | | | | |
| 438(V) | 594 | −988 | −3391 | −2911 | −1164 | −2888 | −2187 | 845 | −2637 | 765 | −154 | −2576 | −2962 | −2387 | −2622 | −2074 | −1205 | 2800 | −2084 | −1724 | 444 |
| — | −149 | −500 | 233 | 43 | −381 | 399 | 106 | −626 | 210 | −466 | −720 | 275 | 394 | 45 | 96 | 359 | 117 | −369 | −294 | −249 | |
| — | −16 | −7108 | −8150 | −894 | −1115 | −701 | −1378 | * | * | | | | | | | | | | | | |
| 439(V) | −1771 | −1603 | −3750 | −3689 | −2037 | −3050 | −3231 | 403 | −3479 | −1154 | −1076 | −3246 | −3399 | −3383 | −3437 | −2628 | −1917 | 3536 | −3074 | −2677 | 445 |
| — | −149 | −500 | 233 | 43 | −381 | 399 | 106 | −626 | 210 | −466 | −720 | 275 | 394 | 45 | 96 | 359 | 117 | −369 | −294 | −249 | |
| — | −16 | −7108 | −8150 | −894 | −1115 | −701 | −1378 | * | * | | | | | | | | | | | | |
| 440(I) | −1754 | −1308 | −4295 | −3867 | −1434 | −3978 | −3377 | 2661 | −3697 | 862 | −247 | −3617 | −3754 | −3406 | −3679 | −3243 | −1725 | 2373 | −2852 | −2526 | 446 |
| — | −149 | −500 | 233 | 43 | −381 | 399 | 106 | −626 | 210 | −466 | −720 | 275 | 394 | 45 | 96 | 359 | 117 | −369 | −294 | −249 | |
| — | −16 | −7108 | −8150 | −894 | −1115 | −701 | −1378 | * | * | | | | | | | | | | | | |
| 441(R) | −2957 | −3022 | −3318 | −2735 | −3796 | −2998 | −1968 | −3912 | −846 | −3631 | −3157 | −2611 | −3280 | −1724 | 4056 | −3026 | −2913 | −3650 | −3096 | −3185 | 447 |
| — | −149 | −500 | 233 | 43 | −381 | 399 | 106 | −626 | 210 | −466 | −720 | 275 | 394 | 45 | 96 | 359 | 117 | −369 | −294 | −249 | |
| — | −16 | −7108 | −8150 | −894 | −1115 | −701 | −1378 | * | * | | | | | | | | | | | | |
| 442(Y) | −1321 | −1438 | −1994 | −1608 | 2186 | 527 | −450 | −1117 | −1481 | −1211 | −693 | 1178 | −2522 | −1217 | −1665 | −1518 | −1275 | −1021 | −198 | 3178 | 448 |
| — | −149 | −500 | 233 | 43 | −381 | 399 | 106 | −626 | 210 | −466 | −720 | 275 | 394 | 45 | 96 | 359 | 117 | −369 | −294 | −249 | |
| — | −16 | −7108 | −8150 | −894 | −1115 | −701 | −1378 | * | * | | | | | | | | | | | | |
| 443(C) | −675 | 2205 | −2544 | 972 | −572 | −2236 | −1121 | 1373 | −1671 | 679 | 261 | −1700 | −2270 | −1403 | −1668 | −1311 | −621 | 1601 | −1150 | −790 | 449 |
| — | −149 | −500 | 233 | 43 | −381 | 399 | 106 | −626 | 210 | −466 | −720 | 275 | 394 | 45 | 96 | 359 | 117 | −369 | −294 | −249 | |
| — | −16 | −7108 | −8150 | −894 | −1115 | −701 | −1378 | * | * | | | | | | | | | | | | |
| 444(G) | −2594 | −2690 | −3304 | −3623 | −4328 | 3747 | −3462 | −4761 | −3953 | −4671 | −4212 | −3320 | −3352 | −3748 | −3779 | −2839 | −2981 | −4004 | −3658 | −4222 | 450 |
| — | −149 | −500 | 233 | 43 | −381 | 399 | 106 | −626 | 210 | −466 | −720 | 275 | 394 | 45 | 96 | 359 | 117 | −369 | −294 | −249 | |
| — | −16 | −7108 | −8150 | −894 | −1115 | −701 | −1378 | * | * | | | | | | | | | | | | |
| 445(P) | −2931 | −2878 | −3420 | −3706 | −4181 | −2925 | −3468 | −4621 | −3859 | −4490 | −4165 | −3491 | 4225 | −3781 | −3695 | −3182 | −3279 | −4087 | −3594 | −4064 | 451 |
| — | −149 | −500 | 233 | 43 | −381 | 399 | 106 | −626 | 210 | −466 | −720 | 275 | 394 | 45 | 96 | 359 | 117 | −369 | −294 | −249 | |
| — | −16 | −7108 | −8150 | −894 | −1115 | −701 | −1378 | * | * | | | | | | | | | | | | |
| 446(K) | −1060 | −2058 | −1088 | −460 | −2432 | −1917 | −357 | −1970 | 2801 | −1978 | −1220 | −632 | −1990 | 1339 | 367 | −999 | −946 | 536 | −2145 | −1717 | 452 |
| — | −149 | −500 | 233 | 43 | −381 | 399 | 106 | −626 | 210 | −466 | −720 | 275 | 394 | 45 | 96 | 359 | 117 | −369 | −294 | −249 | |
| — | −16 | −7108 | −8150 | −894 | −1115 | −701 | −1378 | * | * | | | | | | | | | | | | |
| 447(G) | −2594 | −2690 | −3304 | −3623 | −4328 | 3747 | −3462 | −4761 | −3953 | −4671 | −4212 | −3320 | −3352 | −3748 | −3779 | −2839 | −2981 | −4004 | −3668 | −4222 | 453 |
| — | −149 | −500 | 233 | 43 | −381 | 399 | 106 | −626 | 210 | −466 | −720 | 275 | 394 | 45 | 96 | 359 | 117 | −369 | −294 | −249 | |
| — | −16 | −7108 | −8150 | −894 | −1115 | −701 | −1378 | * | * | | | | | | | | | | | | |
| 448(G) | −2594 | −2690 | −3304 | −3623 | −4328 | 3747 | −3462 | −4761 | −3953 | −4671 | −4212 | −3320 | −3352 | −3748 | −3779 | −2839 | −2981 | −4004 | −3668 | −4222 | 454 |
| — | −149 | −500 | 233 | 43 | −381 | 399 | 106 | −626 | 210 | −466 | −720 | 275 | 394 | 45 | 96 | 359 | 117 | −369 | −294 | −249 | |
| — | −16 | −7108 | −8150 | −894 | −1115 | −701 | −1378 | * | * | | | | | | | | | | | | |
| 449(P) | −2931 | −2878 | −3420 | −3706 | −4181 | −2925 | −3468 | −4621 | −3859 | −4490 | −4165 | −3491 | 4225 | −3781 | −3695 | −3182 | −3279 | −4087 | −3594 | −4064 | 455 |
| — | −149 | −500 | 233 | 43 | −381 | 399 | 106 | −626 | 210 | −466 | −720 | 275 | 394 | 45 | 96 | 359 | 117 | −369 | −294 | −249 | |
| — | −16 | −7108 | −8150 | −894 | −1115 | −701 | −1378 | * | * | | | | | | | | | | | | |
| 450(G) | −2594 | −2690 | −3304 | −3623 | −4328 | 3747 | −3462 | −4761 | −3953 | −4671 | −4212 | −3320 | −3352 | −3748 | −3779 | −2839 | −2981 | −4004 | −3668 | −4222 | 456 |
| — | −149 | −500 | 233 | 43 | −381 | 399 | 106 | −626 | 210 | −466 | −720 | 275 | 394 | 45 | 96 | 359 | 117 | −369 | −294 | −249 | |
| — | −16 | −7108 | −8150 | −894 | −1115 | −701 | −1378 | * | * | | | | | | | | | | | | |
| 451(M) | −2406 | −2296 | −3638 | −3594 | −1525 | −3105 | −2824 | −1047 | −3121 | −596 | 5043 | −3293 | −3425 | −3046 | −2996 | −2911 | −2552 | −1398 | −2513 | −2207 | 457 |
| — | −149 | −500 | 233 | 43 | −381 | 399 | 106 | −626 | 210 | −466 | −720 | 275 | 394 | 45 | 96 | 359 | 117 | −369 | −294 | −249 | |
| — | −16 | −7108 | −8150 | −894 | −1115 | −701 | −1378 | * | * | | | | | | | | | | | | |
| 452(P) | −1659 | −2241 | −2022 | −1646 | −3185 | −2242 | −1373 | −3000 | −450 | −2936 | −2274 | −1624 | 3435 | −1065 | 2095 | −1730 | −1750 | −2593 | −2816 | −2613 | 458 |
| — | −149 | −500 | 233 | 43 | −381 | 399 | 106 | −626 | 210 | −466 | −720 | 275 | 394 | 45 | 96 | 359 | 117 | −369 | −294 | −249 | |
| — | −16 | −7108 | −8150 | −894 | −1115 | −701 | −1378 | * | * | | | | | | | | | | | | |
| 453(E) | −2641 | −3308 | −896 | 3732 | −3966 | −2458 | −2043 | −4105 | −2128 | −4016 | −3555 | −1531 | −2959 | −1842 | −2560 | −2479 | −2750 | −3722 | −3563 | −3385 | 459 |
| — | −149 | −500 | 233 | 43 | −381 | 399 | 106 | −626 | 210 | −466 | −720 | 275 | 394 | 45 | 96 | 359 | 117 | −369 | −294 | −249 | |
| — | −16 | −7108 | −8150 | −894 | −1115 | −701 | −1378 | * | * | | | | | | | | | | | | |
| 454(M) | −2406 | −2296 | −3638 | −3594 | −1525 | −3105 | −2824 | −1047 | −3121 | −596 | 5043 | −3293 | −3425 | −3046 | −2996 | −2911 | −2552 | −1398 | −2513 | −2207 | 460 |
| — | −149 | −500 | 233 | 43 | −381 | 399 | 106 | −626 | 210 | −466 | −720 | 275 | 394 | 45 | 96 | 359 | 117 | −369 | −294 | −249 | |
| — | −16 | −7108 | −8150 | −894 | −1115 | −701 | −1378 | * | * | | | | | | | | | | | | |
| 455(L) | −2871 | −2457 | −4231 | −4103 | −1033 | −3803 | −3165 | −541 | −3734 | 3130 | −31 | −3935 | −3797 | −3286 | −3484 | −3713 | −2869 | −1136 | −2394 | −2220 | 461 |
| — | −149 | −500 | 233 | 43 | −381 | 399 | 106 | −626 | 210 | −466 | −720 | 275 | 394 | 45 | 96 | 359 | 117 | −369 | −294 | −249 | |
| — | −16 | −7108 | −8150 | −894 | −1115 | −701 | −1378 | * | * | | | | | | | | | | | | |
| 456(K) | 1368 | −1491 | −763 | −332 | −2319 | −1417 | −551 | −1998 | 1786 | −2068 | −1221 | −500 | −1721 | −160 | −470 | 1631 | −587 | −1532 | −2299 | −1754 | 462 |
| — | −149 | −500 | 233 | 43 | −381 | 399 | 106 | −626 | 210 | −466 | −720 | 275 | 394 | 45 | 96 | 359 | 117 | −369 | −294 | −249 | |
| — | −16 | −7108 | −8150 | −894 | −1115 | −701 | −1378 | * | * | | | | | | | | | | | | |
| 457(P) | −1500 | −1738 | −2514 | −2380 | −1555 | −2358 | −2022 | −1126 | −2063 | 1224 | −841 | −2189 | 3436 | −2061 | −2129 | −1822 | −1674 | −1231 | −2290 | −1878 | 463 |
| — | −149 | −500 | 233 | 43 | −381 | 399 | 106 | −626 | 210 | −466 | −720 | 275 | 394 | 45 | 96 | 359 | 117 | −369 | −294 | −249 | |
| — | −16 | −7108 | −8150 | −894 | −1115 | −701 | −1378 | * | * | | | | | | | | | | | | |
| 458(T) | −351 | −974 | −2208 | −2185 | −2894 | −1237 | −2041 | −2561 | −2125 | −2863 | −2046 | −1539 | −1948 | −1923 | −2218 | 1543 | 3230 | −1758 | −3139 | −2834 | 464 |
| — | −149 | −500 | 233 | 43 | −381 | 399 | 106 | −626 | 210 | −466 | −720 | 275 | 394 | 45 | 96 | 359 | 117 | −369 | −294 | −249 | |
| — | −16 | −7108 | −8150 | −894 | −1115 | −701 | −1378 | * | * | | | | | | | | | | | | |
| 459(S) | −897 | −1462 | −2333 | −2543 | −3185 | −1640 | −2474 | −3294 | −2686 | −3497 | −2780 | −1973 | −2360 | −2483 | −2703 | 3465 | −1316 | −2413 | −3310 | −3025 | 465 |
| — | −149 | −500 | 233 | 43 | −381 | 399 | 106 | −626 | 210 | −466 | −720 | 275 | 394 | 45 | 96 | 359 | 117 | −369 | −294 | −249 | |
| — | −16 | −7108 | −8150 | −894 | −1115 | −701 | −1378 | * | * | | | | | | | | | | | | |
| 460(M) | 2706 | −986 | −2433 | −2144 | −1502 | −1684 | −1706 | −700 | −1858 | −968 | 2744 | −1705 | −2188 | −1713 | −1932 | −963 | −862 | −592 | −2145 | −1794 | 466 |
| — | −149 | −500 | 233 | 43 | −381 | 399 | 106 | −626 | 210 | −466 | −720 | 275 | 394 | 45 | 96 | 359 | 117 | −369 | −294 | −249 | |
| — | −16 | −7108 | −8150 | −894 | −1115 | −701 | −1378 | * | * | | | | | | | | | | | | |
| 461(I) | −2103 | −1659 | −4461 | −3992 | −869 | −4152 | −3233 | 3082 | −3723 | 1619 | 290 | −3801 | −3788 | −3171 | −3557 | −3432 | −2046 | 487 | −2418 | −2265 | 467 |
| — | −149 | −500 | 233 | 43 | −381 | 399 | 106 | −626 | 210 | −466 | −720 | 275 | 394 | 45 | 96 | 359 | 117 | −369 | −294 | −249 | |
| — | −16 | −7108 | −8150 | −894 | −1115 | −701 | −1378 | * | * | | | | | | | | | | | | |
| 462(I) | −1761 | −1312 | −4317 | −3954 | −1713 | −4027 | −3703 | 3225 | −3814 | −556 | −498 | −3712 | −3859 | −3653 | −3877 | −3344 | −1754 | 2110 | −3216 | −2787 | 468 |
| — | −149 | −500 | 233 | 43 | −381 | 399 | 106 | −626 | 210 | −466 | −720 | 275 | 394 | 45 | 96 | 359 | 117 | −369 | −294 | −249 | |
| — | −16 | −7108 | −8150 | −894 | −1115 | −701 | −1378 | * | * | | | | | | | | | | | | |
| 463(G) | −2594 | −2690 | −3304 | −3623 | −4328 | 3747 | −3462 | −4761 | −3953 | −4671 | −4212 | −3320 | −3352 | −3748 | −3779 | −2839 | −2981 | −4004 | −3668 | −4222 | 469 |
| — | −149 | −500 | 233 | 43 | −381 | 399 | 106 | −626 | 210 | −466 | −720 | 275 | 394 | 45 | 96 | 359 | 117 | −369 | −294 | −249 | |
| — | −16 | −7108 | −8150 | −894 | −1115 | −701 | −1378 | * | * | | | | | | | | | | | | |
| 464(K) | 1641 | −2033 | −323 | 914 | −2415 | −1565 | −296 | −2097 | 2052 | −2080 | −1233 | −257 | −1736 | 125 | −133 | −646 | −702 | −1707 | −2258 | −1657 | 470 |
| — | −149 | −500 | 233 | 43 | −381 | 399 | 106 | −626 | 210 | −466 | −720 | 275 | 394 | 45 | 96 | 359 | 117 | −369 | −294 | −249 | |
| — | −16 | −7108 | −8150 | −894 | −1115 | −701 | −1378 | * | * | | | | | | | | | | | | |
| 465(G) | −2594 | −2690 | −3304 | −3623 | −4328 | 3747 | −3462 | −4761 | −3953 | −4671 | −4212 | −3320 | −3352 | −3748 | −3779 | −2839 | −2981 | −4004 | −3668 | −4222 | 471 |
| — | −149 | −500 | 233 | 43 | −381 | 399 | 106 | −626 | 210 | −466 | −720 | 275 | 394 | 45 | 96 | 359 | 117 | −369 | −294 | −249 | |
| — | −16 | −7108 | −8150 | −894 | −1115 | −701 | −1378 | * | * | | | | | | | | | | | | |
| 466(L) | −1699 | −1807 | −2268 | −1925 | −830 | −2795 | −1551 | −455 | −1225 | 2510 | 90 | −1958 | −2845 | 1927 | −1308 | −2067 | −1651 | −846 | −1841 | −1454 | 472 |
| — | −149 | −500 | 233 | 43 | −381 | 399 | 106 | −626 | 210 | −466 | −720 | 275 | 394 | 45 | 96 | 359 | 117 | −369 | −294 | −249 | |
| — | −16 | −7108 | −8150 | −894 | −1115 | −701 | −1378 | * | * | | | | | | | | | | | | |
| 467(G) | −2594 | −2690 | −3304 | −3623 | −4328 | 3747 | −3462 | −4761 | −3953 | −4671 | −4212 | −3320 | −3352 | −3748 | −3779 | −2839 | −2981 | −4004 | −3668 | 4222 | 473 |
| — | −149 | −500 | 233 | 43 | −381 | 399 | 106 | −626 | 210 | −466 | −720 | 275 | 394 | 45 | 96 | 359 | 117 | −369 | −294 | −249 | |
| — | −16 | −7108 | −8150 | −894 | −1115 | −701 | −1378 | * | * | | | | | | | | | | | | |
| 468(D) | −853 | −2415 | 2115 | 1717 | −2702 | −1468 | −378 | −2484 | 1085 | −2417 | −1546 | −84 | −1732 | 41 | −699 | 696 | −824 | −2025 | −2594 | −1839 | 474 |
| — | −149 | −500 | 233 | 43 | −381 | 399 | 106 | −626 | 210 | −466 | −720 | 275 | 394 | 45 | 96 | 359 | 117 | −369 | −294 | −249 | |
| — | −16 | −7108 | −8150 | −894 | −1115 | −701 | −1378 | * | * | | | | | | | | | | | | |
| 469(S) | −892 | −1780 | −931 | −688 | −2757 | −1643 | −830 | −2472 | 1671 | −2492 | −1708 | −799 | −2018 | −468 | −365 | 2676 | −1004 | −1981 | −2598 | −2130 | 475 |
| — | −149 | −500 | 233 | 43 | −381 | 399 | 106 | −626 | 210 | −466 | −720 | 275 | 394 | 45 | 96 | 359 | 117 | −369 | −294 | −249 | |
| — | −16 | −7108 | −8150 | −894 | −1115 | −701 | −1378 | * | * | | | | | | | | | | | | |
| 470(C) | −1135 | 3503 | −3700 | −3406 | −1670 | −2549 | −2675 | 653 | −3101 | −916 | −667 | −2727 | −2925 | −2870 | −3030 | −1868 | −1288 | 2927 | −2619 | −2222 | 476 |
| — | −149 | −500 | 233 | 43 | −381 | 399 | 106 | −626 | 210 | −466 | −720 | 275 | 394 | 45 | 96 | 359 | 117 | −369 | −294 | −249 | |
| — | −16 | −7108 | −8150 | −894 | −1115 | −701 | −1378 | * | * | | | | | | | | | | | | |
| 471(A) | 2590 | −1035 | −2404 | −2530 | −3236 | 2290 | −2365 | −2954 | −2627 | −3240 | −2389 | −1719 | −2027 | −2302 | −2637 | −656 | −851 | −1991 | −3423 | −3234 | 477 |
| — | −149 | −500 | 233 | 43 | −381 | 399 | 106 | −626 | 210 | −466 | −720 | 275 | 394 | 45 | 96 | 359 | 117 | −369 | −294 | −249 | |
| — | −16 | −7108 | −8150 | −894 | −1115 | −701 | −1378 | * | * | | | | | | | | | | | | |
| 472(L) | −2632 | −2152 | −4630 | −4185 | 1767 | −4324 | −2442 | −61 | −3879 | 2789 | 563 | −3833 | −3823 | −2970 | −3513 | −3609 | −2518 | −738 | −1527 | −945 | 478 |
| — | −149 | −500 | 233 | 43 | −381 | 399 | 106 | −626 | 210 | −466 | −720 | 275 | 394 | 45 | 96 | 359 | 117 | −369 | −294 | −249 | |
| — | −16 | −7108 | −8150 | −894 | −1115 | −701 | −1378 | * | * | | | | | | | | | | | | |
| 473(I) | −2073 | −1632 | −4434 | −3975 | −911 | −4130 | −3238 | 3164 | −3706 | 1451 | 244 | −3779 | −3785 | −3187 | −3557 | −3413 | −2021 | 546 | −2449 | −2273 | 479 |
| — | −149 | −500 | 233 | 43 | −381 | 399 | 106 | −626 | 210 | −466 | −720 | 275 | 394 | 45 | 96 | 359 | 117 | −369 | −294 | −249 | |
| — | −16 | −7108 | −8150 | −894 | −1115 | −701 | −1378 | * | * | | | | | | | | | | | | |
| 474(T) | −1213 | −1674 | −2755 | −2906 | −3163 | −1922 | −2659 | −2698 | −2788 | −3105 | −2612 | −2311 | −2600 | −2708 | −2753 | −1463 | 3819 | −2197 | −3286 | −3156 | 480 |
| — | −149 | −500 | 233 | 43 | −381 | 399 | 106 | −626 | 210 | −466 | −720 | 275 | 394 | 45 | 96 | 359 | 117 | −369 | −294 | −249 | |
| — | −16 | −7108 | −8150 | −894 | −1115 | −701 | −1378 | * | * | | | | | | | | | | | | |
| 475(D) | −2784 | −3432 | 4016 | −1200 | −4140 | −2466 | −2197 | −4505 | −2621 | −4365 | −3956 | −1551 | −3014 | −2039 | −3232 | −2593 | −2938 | −4046 | −3710 | −3552 | 481 |
| — | −149 | −500 | 233 | 43 | −381 | 399 | 106 | −626 | 210 | −466 | −720 | 275 | 394 | 45 | 96 | 359 | 117 | −369 | −294 | −249 | |
| — | −16 | −7108 | −8150 | −894 | −1115 | −701 | −1378 | * | * | | | | | | | | | | | | |
| 476(G) | −2594 | −2690 | −3304 | −3623 | −4328 | 3747 | −3462 | −4761 | −3953 | −4671 | −4212 | −3320 | −3352 | −3748 | −3779 | −2839 | −2981 | −4004 | −3668 | −4222 | 482 |
| — | −149 | −500 | 233 | 43 | −381 | 399 | 106 | −626 | 210 | −466 | −720 | 275 | 394 | 45 | 96 | 359 | 117 | −369 | −294 | −249 | |
| — | −16 | −7108 | −8150 | −894 | −1115 | −701 | −1378 | * | * | | | | | | | | | | | | |
| 477(R) | −2957 | −3022 | −3318 | −2735 | −3796 | −2998 | −1968 | −3912 | −846 | −3631 | −3157 | −2611 | −3280 | −1724 | 4056 | −3026 | −2913 | −3650 | −3096 | −3185 | 483 |
| — | −149 | −500 | 233 | 43 | −381 | 399 | 106 | −626 | 210 | −466 | −720 | 275 | 394 | 45 | 96 | 359 | 117 | −369 | −294 | −249 | |
| — | −16 | −7108 | −8150 | −894 | −1115 | −701 | −1378 | * | * | | | | | | | | | | | | |
| 478(F) | −3342 | −2776 | −4026 | −4232 | 4354 | −3545 | −1431 | −2315 | −4038 | −1801 | −1900 | −3299 | −3780 | −3350 | −3645 | −3490 | −3420 | −2566 | −739 | 349 | 484 |
| — | −149 | −500 | 233 | 43 | −381 | 399 | 106 | −626 | 210 | −466 | −720 | 275 | 394 | 45 | 96 | 359 | 117 | −369 | −294 | −249 | |
| — | −16 | −7108 | −8150 | −894 | −1115 | −701 | −1378 | * | * | | | | | | | | | | | | |
| 479(S) | −897 | −1462 | −2333 | −2543 | −3185 | −1640 | −2474 | −3294 | −2686 | −3497 | −2780 | −1973 | −2360 | −2483 | −2703 | 3465 | −1316 | −2413 | −3310 | −3025 | 485 |
| — | −149 | −500 | 233 | 43 | −381 | 399 | 106 | −626 | 210 | −466 | −720 | 275 | 394 | 45 | 96 | 359 | 117 | −369 | −294 | −249 | |
| — | −16 | −7108 | −8150 | −894 | −1115 | −701 | −1378 | * | * | | | | | | | | | | | | |
| 480(G) | −2594 | −2690 | −3304 | −3623 | −4328 | 3747 | −3462 | −4761 | −3953 | −4671 | −4212 | −3320 | −3352 | −3748 | −3779 | −2839 | −2981 | −4004 | −3668 | 4222 | 486 |
| — | −149 | −500 | 233 | 43 | −381 | 399 | 106 | −626 | 210 | −466 | −720 | 275 | 394 | 45 | 96 | 359 | 117 | −369 | −294 | −249 | |
| — | −16 | −7108 | −8150 | −894 | −1115 | −701 | −1378 | * | * | | | | | | | | | | | | |
| 481(G) | −2594 | −2690 | −3304 | −3623 | −4328 | 3747 | −3462 | −4761 | −3953 | −4671 | −4212 | −3320 | −3352 | −3748 | −3779 | −2839 | −2981 | −4004 | −3668 | −4222 | 487 |
| — | −149 | −500 | 233 | 43 | −381 | 399 | 106 | −626 | 210 | −466 | −720 | 275 | 394 | 45 | 96 | 359 | 117 | −369 | −294 | −249 | |
| — | −16 | −7108 | −8150 | −894 | −1115 | −701 | −1378 | * | * | | | | | | | | | | | | |
| 482(T) | −359 | −976 | −2225 | −2229 | −2900 | −1242 | −2074 | −2560 | −2170 | −2875 | −2064 | −1561 | −1958 | −1969 | −2247 | 1110 | 3375 | −1760 | −3152 | −2850 | 488 |
| — | −149 | −500 | 233 | 43 | −381 | 399 | 106 | −626 | 210 | −466 | −720 | 275 | 394 | 45 | 96 | 359 | 117 | −369 | −294 | −249 | |
| — | −16 | −7108 | −8150 | −894 | −1115 | −701 | −1378 | * | * | | | | | | | | | | | | |
| 483(Y) | −3402 | −2632 | −3941 | −4011 | 1064 | −3924 | 3388 | −2526 | −3541 | −1996 | −1973 | −2625 | −3821 | −2664 | −3170 | −3135 | −3280 | −2619 | 3420 | 3756 | 489 |
| — | −149 | −500 | 233 | 43 | −381 | 399 | 106 | −626 | 210 | −466 | −720 | 275 | 394 | 45 | 96 | 359 | 117 | −369 | −294 | −249 | |
| — | −16 | −7108 | −8150 | −894 | −1115 | −701 | −1378 | * | * | | | | | | | | | | | | |
| 484(G) | −2594 | −2690 | −3304 | −3623 | −4328 | 3747 | −3462 | −4761 | −3953 | −4671 | −4212 | −3320 | −3352 | −3748 | −3779 | −2839 | −2981 | −4004 | −3668 | −4222 | 490 |
| — | −149 | −500 | 233 | 43 | −381 | 399 | 106 | −626 | 210 | −466 | −720 | 275 | 394 | 45 | 96 | 359 | 117 | −369 | −294 | −249 | |
| — | −16 | −7108 | −8150 | −894 | −1115 | −701 | −1378 | * | * | | | | | | | | | | | | |
| 485(M) | −2322 | −1904 | −4536 | −3951 | 2387 | −4112 | −2676 | 67 | −3649 | 2034 | 3156 | −3710 | −3633 | −2803 | −3311 | −3309 | −2204 | −588 | −1794 | −1586 | 491 |
| — | −149 | −500 | 233 | 43 | −381 | 399 | 106 | −626 | 210 | −466 | −720 | 275 | 394 | 45 | 96 | 359 | 117 | −369 | −294 | −249 | |
| — | −16 | −7108 | −8150 | −894 | −1115 | −701 | −1378 | * | * | | | | | | | | | | | | |
| 486(V) | −1771 | −1603 | −3750 | −3689 | −2037 | −3050 | −3231 | 403 | −3479 | −1154 | −1076 | −3246 | −3399 | −3383 | −3437 | −2628 | −1917 | 3536 | −3074 | −2677 | 492 |
| — | −149 | −500 | 233 | 43 | −381 | 399 | 106 | −626 | 210 | −466 | −720 | 275 | 394 | 45 | 96 | 359 | 117 | −369 | −294 | −249 | |
| — | −16 | −7108 | −8150 | −894 | −1115 | −701 | −1378 | * | * | | | | | | | | | | | | |
| 487(V) | −1771 | −1603 | −3750 | −3689 | −2037 | −3050 | −3231 | 403 | −3479 | −1154 | −1076 | −3246 | −3399 | −3383 | −3437 | −2628 | −1917 | 3536 | −3074 | −2677 | 493 |
| — | −149 | −500 | 233 | 43 | −381 | 399 | 106 | −626 | 210 | −466 | −720 | 275 | 394 | 45 | 96 | 359 | 117 | −369 | −294 | −249 | |
| — | −16 | −7108 | −8150 | −894 | −1115 | −701 | −1378 | * | * | | | | | | | | | | | | |
| 488(G) | −2594 | −2690 | −3304 | −3623 | −4328 | 3747 | −3462 | −4761 | −3953 | −4671 | −4212 | −3320 | −3352 | −3748 | −3779 | −2839 | −2981 | −4004 | −3668 | −4222 | 494 |
| — | −149 | −500 | 233 | 43 | −381 | 399 | 106 | −626 | 210 | −466 | −720 | 275 | 394 | 45 | 96 | 359 | 117 | −369 | −294 | −249 | |
| — | −16 | −7108 | −8150 | −894 | −1115 | −701 | −1378 | * | * | | | | | | | | | | | | |
| 489(H) | −3205 | −3079 | −2723 | −2890 | −2110 | −3046 | 5295 | −4135 | −2617 | −3813 | −3561 | −2886 | −3482 | −2833 | −2620 | −3291 | −3356 | −3895 | −2397 | −1681 | 495 |
| — | −149 | −500 | 233 | 43 | −381 | 399 | 106 | −626 | 210 | −466 | −720 | 275 | 394 | 45 | 96 | 359 | 117 | −369 | −294 | −249 | |
| — | −16 | −7108 | −8150 | −894 | −1115 | −701 | −1378 | * | * | | | | | | | | | | | | |
| 490(V) | −1754 | −1297 | −4329 | −3968 | −1770 | −4053 | −3752 | 2604 | −3840 | −621 | −545 | −3728 | −3878 | −3699 | −3917 | −3370 | −1746 | 2859 | −3276 | −2829 | 496 |
| — | −149 | −500 | 233 | 43 | −381 | 399 | 106 | −626 | 210 | −466 | −720 | 275 | 394 | 45 | 96 | 359 | 117 | −369 | −294 | −249 | |
| — | −16 | −7108 | −8150 | −894 | −1115 | −701 | −1378 | * | * | | | | | | | | | | | | |
| 491(A) | 2587 | −828 | −2477 | −2155 | −1837 | −1468 | −1728 | −743 | −1941 | −1564 | −954 | −1607 | −2033 | −1725 | −2034 | −738 | 1178 | 1108 | −2310 | −1972 | 497 |
| — | −149 | −500 | 233 | 43 | −381 | 399 | 106 | −626 | 210 | −466 | −720 | 275 | 394 | 45 | 96 | 359 | 117 | −369 | −294 | −249 | |
| — | −16 | −7108 | −8150 | −894 | −1115 | −701 | −1378 | * | * | | | | | | | | | | | | |
| 492(P) | −2931 | −2878 | −3420 | −3706 | −4181 | −2925 | −3468 | −4621 | −3859 | −4490 | −4165 | −3491 | 4225 | −3781 | −3695 | −3182 | −3279 | −4087 | −3594 | 4064 | 498 |
| — | −149 | −500 | 233 | 43 | −381 | 399 | 106 | −626 | 210 | −466 | −720 | 275 | 394 | 45 | 96 | 359 | 117 | −369 | −294 | −249 | |
| — | −16 | −7108 | −8150 | −894 | −1115 | −701 | −1378 | * | * | | | | | | | | | | | | |
| 493(E) | −2641 | −3308 | −896 | 3732 | −3966 | −2458 | −2043 | −4105 | −2128 | −4016 | −3555 | −1531 | −2959 | −1842 | −2560 | −2479 | −2750 | −3722 | −3563 | −3385 | 499 |
| — | −149 | −500 | 233 | 43 | −381 | 399 | 106 | −626 | 210 | −466 | −720 | 275 | 394 | 45 | 96 | 359 | 117 | −369 | −294 | −249 | |
| — | −16 | −7108 | −8150 | −894 | −1115 | −701 | −1378 | * | * | | | | | | | | | | | | |
| 494(A) | 3438 | −1472 | −2846 | −3040 | −3287 | −1726 | −2735 | −2840 | −3028 | −3257 | −2662 | −2235 | −2447 | −2798 | −2944 | −1216 | −1387 | −2183 | −3405 | −3320 | 500 |
| — | −149 | −500 | 233 | 43 | −381 | 399 | 106 | −626 | 210 | −466 | −720 | 275 | 394 | 45 | 96 | 359 | 117 | −369 | −294 | −249 | |
| — | −16 | −7108 | −8150 | −894 | −1115 | −701 | −1378 | * | * | | | | | | | | | | | | |
| 495(Y) | −866 | −976 | −1863 | −1331 | 1353 | −2145 | 1318 | −556 | −1116 | −777 | −173 | −1242 | −2197 | 1714 | −1301 | −1173 | −802 | 888 | −445 | 2749 | 501 |
| — | −149 | −500 | 233 | 43 | −381 | 399 | 106 | −626 | 210 | −466 | −720 | 275 | 394 | 45 | 96 | 359 | 117 | −369 | −294 | −249 | |
| — | −16 | −7108 | −8150 | −894 | −1115 | −701 | −1378 | * | * | | | | | | | | | | | | |
| 496(D) | 417 | −1831 | 1647 | 1094 | −2065 | −1488 | −353 | −1618 | −107 | −1820 | −1019 | −189 | −1698 | 30 | −623 | −603 | −643 | 1629 | −2154 | −1520 | 502 |
| — | −149 | −500 | 233 | 43 | −381 | 399 | 106 | −626 | 210 | −466 | −720 | 275 | 394 | 45 | 96 | 359 | 117 | −369 | −294 | −249 | |
| — | −16 | −7108 | −8150 | −894 | −1115 | −701 | −1378 | * | * | | | | | | | | | | | | |
| 497(G) | −2594 | −2690 | −3304 | −3623 | −4328 | 3747 | −3462 | −4761 | −3953 | −4671 | −4212 | −3320 | −3352 | −3748 | −3779 | −2839 | −2981 | −4004 | −3668 | 4222 | 503 |
| — | −149 | −500 | 233 | 43 | −381 | 399 | 106 | −626 | 210 | −466 | −720 | 275 | 394 | 45 | 96 | 359 | 117 | −369 | −294 | −249 | |
| — | −16 | −7108 | −8150 | −894 | −1115 | −701 | −1378 | * | * | | | | | | | | | | | | |
| 498(G) | −2594 | −2690 | −3304 | −3623 | −4328 | 3747 | −3462 | −4761 | −3953 | −4671 | −4212 | −3320 | −3352 | −3748 | −3779 | −2839 | −2981 | −4004 | −3668 | 4222 | 504 |
| — | −149 | −500 | 233 | 43 | −381 | 399 | 106 | −626 | 210 | −466 | −720 | 275 | 394 | 45 | 96 | 359 | 117 | −369 | −294 | −249 | |
| — | −16 | −7108 | −8150 | −894 | −1115 | −701 | −1378 | * | * | | | | | | | | | | | | |
| 499(T) | 492 | −1190 | −706 | −181 | −1475 | 311 | −333 | −1099 | −81 | 71 | −509 | 570 | 1113 | −6 | −509 | −450 | 1123 | −835 | −1680 | −1161 | 505 |
| — | −149 | −500 | 233 | 43 | −381 | 399 | 106 | −626 | 210 | −466 | −720 | 275 | 394 | 45 | 96 | 359 | 117 | −369 | −294 | −249 | |
| — | −16 | −7108 | −8150 | −894 | −1115 | −701 | −1378 | * | * | | | | | | | | | | | | |
| 500(I) | −2091 | −1746 | −3971 | −3840 | −1676 | −3532 | −3289 | 3684 | −3581 | −659 | −693 | −3562 | −3674 | −3445 | −3521 | −3194 | −2146 | 449 | −2877 | −2493 | 506 |
| — | −149 | −500 | 233 | 43 | −381 | 399 | 106 | −626 | 210 | −466 | −720 | 275 | 394 | 45 | 96 | 359 | 117 | −369 | −294 | −249 | |
| — | −16 | −7108 | −8150 | −894 | −1115 | −701 | −1378 | * | * | | | | | | | | | | | | |
| 501(A) | 3103 | −1036 | −2445 | −2572 | −3222 | 1051 | −2380 | −2930 | −2650 | −3226 | −2381 | −1739 | −2034 | −2327 | −2648 | −664 | −857 | −1981 | −3412 | −3228 | 507 |
| — | −149 | −500 | 233 | 43 | −381 | 399 | 106 | −626 | 210 | −466 | −720 | 275 | 394 | 45 | 96 | 359 | 117 | −369 | −294 | −249 | |
| — | −16 | −7108 | −8150 | −894 | −1115 | −701 | −1378 | * | * | | | | | | | | | | | | |
| 502(L) | −2239 | −1892 | −3711 | −3400 | 301 | −3520 | −1210 | −542 | −2948 | 2564 | −35 | −2786 | −3395 | −2438 | −2750 | −2747 | −2165 | −945 | −573 | 2562 | 508 |
| — | −149 | −500 | 233 | 43 | −381 | 399 | 106 | −626 | 210 | −466 | −720 | 275 | 394 | 45 | 96 | 359 | 117 | −369 | −294 | −249 | |
| — | −16 | −7108 | −8150 | −894 | −1115 | −701 | −1378 | * | * | | | | | | | | | | | | |
| 503(V) | −1757 | −1387 | −4101 | −3681 | −1174 | −3714 | −3031 | 880 | −3410 | 1254 | −60 | −3407 | −3585 | −3094 | −3354 | −2984 | −1743 | 3014 | −2536 | −2219 | 509 |
| — | −149 | −500 | 233 | 43 | −381 | 399 | 106 | −626 | 210 | −466 | −720 | 275 | 394 | 45 | 96 | 359 | 117 | −369 | −294 | −249 | |
| — | −16 | −7108 | −8150 | −894 | −1115 | −701 | −1378 | * | * | | | | | | | | | | | | |
| 504(Q) | −982 | −2251 | −866 | 971 | −2711 | −1822 | −252 | −2340 | 1444 | −2194 | −1356 | −464 | −1885 | 2646 | 1632 | −858 | −863 | −1958 | −2245 | −1765 | 510 |
| — | −149 | −500 | 233 | 43 | −381 | 399 | 106 | −626 | 210 | −466 | −720 | 275 | 394 | 45 | 96 | 359 | 117 | −369 | −294 | −249 | |
| — | −16 | −7108 | −8150 | −894 | −1115 | −701 | −1378 | * | * | | | | | | | | | | | | |
| 505(E) | −1162 | −2771 | 2137 | 2239 | −3046 | −1526 | −626 | −2849 | −546 | −2792 | −1983 | −145 | −1905 | −242 | −1192 | −940 | 1396 | −2385 | −2990 | −2169 | 511 |
| — | −149 | −500 | 233 | 43 | −381 | 399 | 106 | −626 | 210 | −466 | −720 | 275 | 394 | 45 | 96 | 359 | 117 | −369 | −294 | −249 | |
| — | −16 | −7108 | −8150 | −894 | −1115 | −701 | −1378 | * | * | | | | | | | | | | | | |
| 506(G) | −1707 | −2684 | 1591 | −614 | −3783 | 3190 | −1613 | −3795 | −1887 | −3775 | −3119 | −915 | −2456 | −1358 | −2539 | −1610 | −1924 | −3150 | −3636 | −3124 | 512 |
| — | −149 | −500 | 233 | 43 | −381 | 399 | 106 | −626 | 210 | −466 | −720 | 275 | 394 | 45 | 96 | 359 | 117 | −369 | −294 | −249 | |
| — | −16 | −7108 | −8150 | −894 | −1115 | −701 | −1378 | * | * | | | | | | | | | | | | |
| 507(D) | −2784 | −3432 | 4016 | −1200 | −4140 | −2466 | −2197 | −4505 | −2621 | −4365 | −3956 | −1551 | −3014 | −2039 | −3232 | −2593 | −2938 | −4046 | −3710 | −3552 | 513 |
| — | −149 | −500 | 233 | 43 | −381 | 399 | 106 | −626 | 210 | −466 | −720 | 275 | 394 | 45 | 96 | 359 | 117 | −369 | −294 | −249 | |
| — | −16 | −7108 | −8150 | −894 | −1115 | −701 | −1378 | * | * | | | | | | | | | | | | |
| 508(M) | −473 | −522 | −1819 | −1236 | −468 | −1879 | −687 | 1519 | −996 | 566 | 1677 | −1154 | −1937 | 836 | −1131 | 1079 | −413 | 102 | −957 | −585 | 514 |
| — | −149 | −500 | 233 | 43 | −381 | 399 | 106 | −626 | 210 | −466 | −720 | 275 | 394 | 45 | 96 | 359 | 117 | −369 | −294 | −249 | |
| — | −16 | −7108 | −8150 | −894 | −1115 | −701 | −1378 | * | * | | | | | | | | | | | | |
| 509(I) | −1761 | −1312 | −4317 | −3954 | −1713 | −4027 | −3703 | 3225 | −3814 | −556 | −498 | −3712 | −3859 | −3653 | −3877 | −3344 | −1754 | 2110 | −3216 | −2787 | 515 |
| — | −149 | −500 | 233 | 43 | −381 | 399 | 106 | −626 | 210 | −466 | −720 | 275 | 394 | 45 | 96 | 359 | 117 | −369 | −294 | −249 | |
| — | −16 | −7108 | −8150 | −894 | −1115 | −701 | −1378 | * | * | | | | | | | | | | | | |
| 510(T) | 782 | −1467 | −550 | 1029 | −2202 | −1425 | −709 | −1791 | −472 | −1993 | −1203 | −528 | −1787 | −368 | −902 | −617 | 2685 | −1400 | −2333 | −1783 | 516 |
| — | −149 | −500 | 233 | 43 | −381 | 399 | 106 | −626 | 210 | −466 | −720 | 275 | 394 | 45 | 96 | 359 | 117 | −369 | −294 | −249 | |
| — | −16 | −7108 | −8150 | −894 | −1115 | −701 | −1378 | * | * | | | | | | | | | | | | |
| 511(I) | −1766 | −1333 | −4283 | −3923 | −1635 | −3967 | −3619 | 3388 | −3759 | −473 | −437 | −3672 | −3822 | −3576 | −3804 | −3285 | −1764 | 1695 | −3126 | −2717 | 517 |
| — | −149 | −500 | 233 | 43 | −381 | 399 | 106 | −626 | 210 | −466 | −720 | 275 | 394 | 45 | 96 | 359 | 117 | −369 | −294 | −249 | |
| — | −16 | −7108 | −8150 | −894 | −1115 | −701 | −1378 | * | * | | | | | | | | | | | | |
| 512(D) | −2784 | −3432 | 4016 | −1200 | −4140 | −2466 | −2197 | −4505 | −2621 | −4365 | −3956 | −1551 | −3014 | −2039 | −3232 | −2593 | −2938 | −4046 | −3710 | −3552 | 518 |
| — | −149 | −500 | 233 | 43 | −381 | 399 | 106 | −626 | 210 | −466 | −720 | 275 | 394 | 45 | 96 | 359 | 117 | −369 | −294 | −249 | |
| — | −16 | −7108 | −8150 | −894 | −1115 | −701 | −1378 | * | * | | | | | | | | | | | | |
| 513(A) | 2705 | −1451 | −1036 | −913 | −2506 | −1504 | −1143 | −2174 | −794 | −2337 | −1613 | −946 | −1993 | 2040 | −1061 | −809 | −910 | −1703 | −2633 | −2156 | 519 |
| — | −149 | −500 | 233 | 43 | −381 | 399 | 106 | −626 | 210 | −466 | −720 | 275 | 394 | 45 | 96 | 359 | 117 | −369 | −294 | −249 | |
| — | −16 | −7108 | −8150 | −894 | −1115 | −701 | −1378 | * | * | | | | | | | | | | | | |
| 514(H) | −615 | −1680 | 1444 | 66 | −1883 | 168 | 2650 | −1558 | −86 | −1691 | −891 | −223 | −1680 | 31 | −577 | −571 | −585 | 1267 | −2007 | −1397 | 520 |
| — | −149 | −500 | 233 | 43 | −381 | 399 | 106 | −626 | 210 | −466 | −720 | 275 | 394 | 45 | 96 | 359 | 117 | −369 | −294 | −249 | |
| — | −16 | −7108 | −8150 | −894 | −1115 | −701 | −1378 | * | * | | | | | | | | | | | | |
| 515(K) | −654 | −2006 | −546 | 42 | −2376 | −1581 | −133 | −2066 | 1935 | −1987 | −1107 | 1132 | −1658 | 1043 | 1058 | −540 | 1180 | −1660 | −2113 | −1532 | 521 |
| — | −149 | −500 | 233 | 43 | −381 | 399 | 106 | −626 | 210 | −466 | −720 | 275 | 394 | 45 | 96 | 359 | 117 | −369 | −294 | −249 | |
| — | −16 | −7108 | −8150 | −894 | −1115 | −701 | −1378 | * | * | | | | | | | | | | | | |
| 516(N) | −933 | −2085 | −946 | −284 | −2472 | −1822 | −253 | −2090 | 1711 | 76 | −1204 | 1918 | −1876 | 175 | 1799 | −841 | −817 | −1755 | −2132 | −1663 | 522 |
| — | −149 | −500 | 233 | 43 | −381 | 399 | 106 | −626 | 210 | −466 | −720 | 275 | 394 | 45 | 96 | 359 | 117 | −369 | −294 | −249 | |
| — | −16 | −7108 | −8150 | −894 | −1115 | −701 | −1378 | * | * | | | | | | | | | | | | |
| 517(E) | −416 | −987 | −843 | 1107 | −1070 | −1583 | −338 | −623 | −183 | 879 | −172 | −489 | −1679 | −94 | −565 | 544 | 813 | 265 | −1379 | −905 | 523 |
| — | −149 | −500 | 233 | 43 | −381 | 399 | 106 | −626 | 210 | −466 | −720 | 275 | 394 | 45 | 96 | 359 | 117 | −369 | −294 | −249 | |
| — | −16 | −7108 | −8150 | −894 | −1115 | −701 | −1378 | * | * | | | | | | | | | | | | |
| 518(I) | −2258 | −1804 | −4588 | −4084 | −706 | −4269 | −3231 | 2527 | −3807 | 2292 | 465 | −3923 | −3814 | −3118 | −3570 | −3544 | −2181 | 190 | −2303 | −2237 | 524 |
| — | −149 | −500 | 233 | 43 | −381 | 399 | 106 | −626 | 210 | −466 | −720 | 275 | 394 | 45 | 96 | 359 | 117 | −369 | −294 | −249 | |
| — | −16 | −7108 | −8150 | −894 | −1115 | −701 | −1378 | * | * | | | | | | | | | | | | |
| 519(Q) | −477 | −1909 | 958 | 282 | −2211 | −1389 | 1484 | −1953 | 285 | −1921 | −1018 | −32 | −1517 | 2318 | −225 | 630 | 559 | −1525 | −2110 | −1430 | 525 |
| — | −149 | −500 | 233 | 43 | −381 | 399 | 106 | −626 | 210 | −466 | −720 | 275 | 394 | 45 | 96 | 359 | 117 | −369 | −294 | −249 | |
| — | −16 | −7108 | −8150 | −894 | −1115 | −701 | −1378 | * | * | | | | | | | | | | | | |
| 520(L) | −2127 | −1743 | −4402 | −3796 | 1257 | −3918 | −2674 | 149 | −3492 | 2527 | 2164 | −3553 | −3509 | −2714 | −3181 | −3095 | −2019 | 570 | −1870 | −1818 | 526 |
| — | −149 | −500 | 233 | 43 | −381 | 399 | 106 | −626 | 210 | −466 | −720 | 275 | 394 | 45 | 96 | 359 | 117 | −369 | −294 | −249 | |
| — | −16 | −7108 | −8150 | −894 | −1115 | −701 | −1378 | * | * | | | | | | | | | | | | |
| 521(N) | −723 | −2217 | 958 | 236 | −2518 | −1456 | 1611 | −2279 | 1719 | −2217 | −1334 | 2285 | −1666 | 166 | −401 | −570 | −677 | −1837 | −2382 | −1678 | 527 |
| — | −149 | −500 | 233 | 43 | −381 | 399 | 106 | −626 | 210 | −466 | −720 | 275 | 394 | 45 | 96 | 359 | 117 | −369 | −294 | −249 | |
| — | −16 | −7108 | −8150 | −894 | −1115 | −701 | −1378 | * | * | | | | | | | | | | | | |
| 522(V) | −1754 | −1297 | −4330 | −3968 | −1770 | −4053 | −3752 | 2623 | −3841 | −620 | −545 | −3729 | −3878 | −3699 | −3918 | −3371 | −1746 | 2846 | −3277 | −2830 | 528 |
| — | −149 | −500 | 233 | 43 | −381 | 399 | 106 | −626 | 210 | −466 | −720 | 275 | 394 | 45 | 96 | 359 | 117 | −369 | −294 | −249 | |
| — | −16 | −7108 | −8150 | −894 | −1115 | −701 | −1378 | * | * | | | | | | | | | | | | |
| 523(S) | 1545 | −974 | −2003 | −1825 | −2867 | −1206 | −1790 | −2580 | −1788 | −2795 | −1932 | −1362 | 1826 | −1586 | −1999 | 2362 | −672 | −1755 | −3057 | −2721 | 529 |
| — | −149 | −500 | 233 | 43 | −381 | 399 | 106 | −626 | 210 | −466 | −720 | 275 | 394 | 45 | 96 | 359 | 117 | −369 | −294 | −249 | |
| — | −16 | −7108 | −8150 | −894 | −1115 | −701 | −1378 | * | * | | | | | | | | | | | | |
| 524(D) | −1776 | −3649 | 3326 | 1869 | −3838 | −1642 | −1031 | −3788 | −1322 | −3660 | −3029 | −245 | −2192 | −711 | −2201 | −1425 | −1855 | −3264 | −3821 | −2816 | 530 |
| — | −149 | −500 | 233 | 43 | −381 | 399 | 106 | −626 | 210 | −466 | −720 | 275 | 394 | 45 | 96 | 359 | 117 | −369 | −294 | −249 | |
| — | −16 | −7108 | −8150 | −894 | −1115 | −701 | −1378 | * | * | | | | | | | | | | | | |
| 525(E) | 423 | −2950 | 1944 | 2696 | −3223 | −1545 | −718 | −3047 | −715 | −2979 | −2196 | −161 | −1968 | −347 | −1403 | −1043 | −1314 | −2569 | −3177 | −2316 | 531 |
| — | −149 | −500 | 233 | 43 | −381 | 399 | 106 | −626 | 210 | −466 | −720 | 275 | 394 | 45 | 96 | 359 | 117 | −369 | −294 | −249 | |
| — | −16 | −7108 | −8150 | −894 | −1115 | −701 | −1378 | * | * | | | | | | | | | | | | |
| 526(E) | −2641 | −3308 | −896 | 3732 | −3966 | −2458 | −2043 | −4105 | −2128 | −4016 | −3555 | −1531 | −2959 | −1842 | −2560 | −2479 | −2750 | −3722 | −3563 | −3385 | 532 |
| — | −149 | −500 | 233 | 43 | −381 | 399 | 106 | −626 | 210 | −466 | −720 | 275 | 394 | 45 | 96 | 359 | 117 | −369 | −294 | −249 | |
| — | −16 | −7108 | −8150 | −894 | −1115 | −701 | −1378 | * | * | | | | | | | | | | | | |
| 527(L) | −2339 | −1899 | −4618 | −4042 | 1570 | −4204 | −2849 | 1440 | −3758 | 2558 | 676 | −3825 | −3700 | −2902 | −3418 | −3418 | −2226 | −382 | −1924 | −1778 | 533 |
| — | −149 | −500 | 233 | 43 | −381 | 399 | 106 | −626 | 210 | −466 | −720 | 275 | 394 | 45 | 96 | 359 | 117 | −369 | −294 | −249 | |
| — | −16 | −7108 | −8150 | −894 | −1115 | −701 | −1378 | * | * | | | | | | | | | | | | |
| 528(A) | 2338 | −1990 | −241 | 938 | −2395 | −1557 | −423 | −2061 | 954 | −2103 | −1286 | −301 | −1791 | −26 | −375 | −717 | −784 | −1691 | −2330 | −1728 | 534 |
| — | −149 | −500 | 233 | 43 | −381 | 399 | 106 | −626 | 210 | −466 | −720 | 275 | 394 | 45 | 96 | 359 | 117 | −369 | −294 | −249 | |
| — | −16 | −7108 | −8150 | −894 | −1115 | −701 | −1378 | * | * | | | | | | | | | | | | |
| 529(R) | 524 | −2098 | −789 | −146 | −2504 | −1729 | 1632 | −2153 | 1229 | −2054 | −1204 | −379 | −1789 | 1328 | 2313 | −719 | −724 | −1774 | −2150 | −1637 | 535 |
| — | −149 | −500 | 233 | 43 | −381 | 399 | 106 | −626 | 210 | −466 | −720 | 275 | 394 | 45 | 96 | 359 | 117 | −369 | −294 | −249 | |
| — | −16 | −7108 | −8150 | −894 | −1115 | −701 | −1378 | * | * | | | | | | | | | | | | |
| 530(R) | −2957 | −3022 | −3318 | −2735 | −3796 | −2998 | −1968 | −3912 | −846 | −3631 | −3157 | −2611 | −3280 | −1724 | 4056 | −3026 | −2913 | −3650 | −3096 | −3185 | 536 |
| — | −149 | −500 | 233 | 43 | −381 | 399 | 106 | −626 | 210 | −466 | −720 | 275 | 394 | 45 | 96 | 359 | 117 | −369 | −294 | −249 | |
| — | −16 | −7108 | −8150 | −894 | −1115 | −701 | −1378 | * | * | | | | | | | | | | | | |
| 531(R) | −1895 | −2713 | −2327 | −1192 | −3484 | −2502 | −481 | −2856 | 2144 | −2544 | −1842 | −1161 | −2458 | 1393 | 3023 | −1770 | −1619 | −2599 | −2421 | −2259 | 537 |
| — | −149 | −500 | 233 | 43 | −381 | 399 | 106 | −626 | 210 | −466 | −720 | 275 | 394 | 45 | 96 | 359 | 117 | −369 | −294 | −249 | |
| — | −16 | −7108 | −8150 | −894 | −1115 | −701 | −1378 | * | * | | | | | | | | | | | | |
| 532(A) | 2935 | −1714 | −553 | 857 | −2769 | −1546 | −1218 | −2333 | −1106 | −2591 | −1873 | −809 | −2065 | −934 | −1502 | −954 | −1103 | −1872 | −2898 | −2374 | 538 |
| — | −149 | −500 | 233 | 43 | −381 | 399 | 106 | −626 | 210 | −466 | −720 | 275 | 394 | 45 | 96 | 359 | 117 | −369 | −294 | −249 | |
| — | −16 | −7108 | −8150 | −894 | −1115 | −701 | −1378 | * | * | | | | | | | | | | | | |
| 533(A) | 1291 | −1874 | −176 | 1227 | −2177 | −1392 | −109 | −1909 | 277 | −1891 | −995 | 1134 | −1522 | 1248 | −228 | −361 | 562 | −1492 | −2090 | −1419 | 539 |
| — | −149 | −500 | 233 | 43 | −381 | 399 | 106 | −626 | 210 | −466 | −720 | 275 | 394 | 45 | 96 | 359 | 117 | −369 | −294 | −249 | |
| — | −16 | −7108 | −8150 | −894 | −1115 | −701 | −1378 | * | * | | | | | | | | | | | | |
| 534(W) | −805 | −687 | −2581 | −2028 | 138 | −2236 | −697 | 897 | −1681 | −421 | 141 | −1645 | −2282 | −1369 | −1627 | −1315 | 636 | −90 | 4479 | 1809 | 540 |
| — | −149 | −500 | 233 | 43 | −381 | 399 | 106 | −626 | 210 | −466 | −720 | 275 | 394 | 45 | 96 | 359 | 117 | −369 | −294 | −249 | |
| — | −16 | −7108 | −8150 | −894 | −1115 | −701 | −1378 | * | * | | | | | | | | | | | | |
| 535(H) | −408 | −1801 | −274 | 1284 | −2096 | −1385 | 1500 | −1822 | 1168 | −1802 | −899 | −33 | −1479 | 1381 | −102 | −303 | 595 | 221 | −1996 | −1339 | 541 |
| — | −149 | −500 | 233 | 43 | −381 | 399 | 106 | −626 | 210 | −466 | −720 | 275 | 394 | 45 | 96 | 359 | 117 | −369 | −294 | −249 | |
| — | −16 | −7108 | −8150 | −894 | −1115 | −701 | −1378 | * | * | | | | | | | | | | | | |
| 536(Q) | −650 | −1737 | −627 | −72 | −1981 | −1615 | −209 | −1625 | 1223 | 392 | −866 | −318 | 1222 | 2120 | 50 | −598 | −572 | −1326 | −1932 | −1394 | 542 |
| — | −149 | −500 | 233 | 43 | −381 | 399 | 106 | −626 | 210 | −466 | −720 | 275 | 394 | 45 | 96 | 359 | 117 | −369 | −294 | −249 | |
| — | −16 | −7108 | −8150 | −894 | −1115 | −701 | −1378 | * | * | | | | | | | | | | | | |
| 537(P) | −2931 | −2878 | −3420 | −3706 | −4181 | −2925 | −3468 | −4621 | −3859 | −4490 | −4165 | −3491 | 4225 | −3781 | −3695 | −3182 | −3279 | −4087 | −3594 | −4064 | 543 |
| — | −149 | −500 | 233 | 43 | −381 | 399 | 106 | −626 | 210 | −466 | −720 | 275 | 394 | 45 | 96 | 359 | 117 | −369 | −294 | −249 | |
| — | −324 | −7108 | −2368 | −894 | −1115 | −701 | −1378 | * | * | | | | | | | | | | | | |
| 538(A) | 2195 | −924 | −968 | −546 | −1397 | −1356 | −583 | −812 | −365 | −1167 | −487 | −618 | −1660 | 1324 | −684 | 483 | −404 | 462 | −1703 | −1242 | 544 |
| — | −149 | −500 | 233 | 43 | −381 | 399 | 106 | −626 | 210 | −466 | −720 | 275 | 394 | 45 | 96 | 359 | 117 | −369 | −294 | −249 | |
| — | −19 | −6804 | −7846 | −894 | −1115 | −428 | −1961 | * | * | | | | | | | | | | | | |
| 539(P) | 411 | −1017 | −1886 | −1616 | −1600 | −1588 | −1411 | −962 | −1408 | 495 | −755 | −1384 | 3156 | −1323 | −1577 | −847 | −785 | −783 | −2111 | −1716 | 545 |
| — | −149 | −500 | 233 | 43 | −381 | 399 | 106 | −626 | 210 | −466 | −720 | 275 | 394 | 45 | 96 | 359 | 117 | −369 | −294 | −249 | |
| — | −16 | −7108 | −8150 | −894 | −1115 | −701 | −1378 | * | * | | | | | | | | | | | | |
| 540(R) | −1612 | −2397 | −2037 | −1033 | −2897 | −2352 | −458 | −2365 | 2184 | 665 | −1520 | −1051 | −2334 | −51 | 2602 | −1545 | −1395 | −2143 | −2262 | −2014 | 546 |
| — | −149 | −500 | 233 | 43 | −381 | 399 | 106 | −626 | 210 | −466 | −720 | 275 | 394 | 45 | 96 | 359 | 117 | −369 | −294 | −249 | |
| — | −16 | −7108 | −8150 | −894 | −1115 | −701 | −1378 | * | * | | | | | | | | | | | | |
| 541(Y) | 712 | −796 | −2334 | −1883 | −370 | −2028 | −986 | −143 | −1607 | −663 | −131 | −1587 | −2243 | −1383 | −1656 | −1178 | −771 | 1114 | −965 | 3479 | 547 |
| — | −149 | −500 | 233 | 43 | −381 | 399 | 106 | −626 | 210 | −466 | −720 | 275 | 394 | 45 | 96 | 359 | 117 | −369 | −294 | −249 | |
| — | −16 | −7108 | −8150 | −894 | −1115 | −701 | −1378 | * | * | | | | | | | | | | | | |
| 542(T) | −527 | −1669 | 1091 | −27 | −2315 | −1379 | −443 | −2033 | −151 | −2081 | −1218 | −282 | 557 | −41 | −650 | 1128 | 2077 | −1576 | −2321 | −1690 | 548 |
| — | −149 | −500 | 233 | 43 | −381 | 399 | 106 | −626 | 210 | −466 | −720 | 275 | 394 | 45 | 96 | 359 | 117 | −369 | −294 | −249 | |
| — | −16 | −7108 | −8150 | −894 | −1115 | −701 | −1378 | * | * | | | | | | | | | | | | |
| 543(R) | −2957 | −3022 | −3318 | −2735 | −3796 | −2998 | −1968 | −3912 | −846 | −3631 | −3157 | −2611 | −3280 | −1724 | 4056 | −3026 | −2913 | −3650 | −3096 | −3185 | 549 |
| — | −149 | −500 | 233 | 43 | −381 | 399 | 106 | −626 | 210 | −466 | −720 | 275 | 394 | 45 | 96 | 359 | 117 | −369 | −294 | −249 | |
| — | −16 | −7108 | −8150 | −894 | −1115 | −701 | −1378 | * | * | | | | | | | | | | | | |
| 544(G) | −2594 | −2690 | −3304 | −3623 | −4328 | 3747 | −3462 | −4761 | −3953 | −4671 | −4212 | −3320 | −3352 | −3748 | −3779 | −2839 | −2981 | −4004 | −3668 | −4222 | 550 |
| — | −149 | −500 | 233 | 43 | −381 | 399 | 106 | −626 | 210 | −466 | −720 | 275 | 394 | 45 | 96 | 359 | 117 | −369 | −294 | −249 | |
| — | −16 | −7108 | −8150 | −894 | −1115 | −701 | −1378 | * | * | | | | | | | | | | | | |
| 545(V) | −1747 | −1296 | −4310 | −3948 | −1758 | −4023 | −3716 | 2215 | −3813 | −615 | −540 | −3705 | −3860 | −3670 | −3887 | −3339 | −1741 | 3087 | −3252 | −2806 | 551 |
| — | −149 | −500 | 233 | 43 | −381 | 399 | 106 | −626 | 210 | −466 | −720 | 275 | 394 | 45 | 96 | 359 | 117 | −369 | −294 | −249 | |
| — | −16 | −7108 | −8150 | −894 | −1115 | −701 | −1378 | * | * | | | | | | | | | | | | |
| 546(L) | −2871 | −2457 | −4231 | −4103 | −1033 | −3803 | −3165 | −541 | −3734 | 3130 | −31 | −3935 | −3797 | −3286 | −3484 | −3713 | −2869 | −1136 | −2394 | −2220 | 552 |
| — | −149 | −500 | 233 | 43 | −381 | 399 | 106 | −626 | 210 | −466 | −720 | 275 | 394 | 45 | 96 | 359 | 117 | −369 | −294 | −249 | |
| — | −16 | −7108 | −8150 | −894 | −1115 | −701 | −1378 | * | * | | | | | | | | | | | | |
| 547(A) | 2404 | −890 | −1926 | −1629 | −1803 | 1275 | −1415 | −1282 | −1490 | 392 | −963 | −1316 | −1930 | −1328 | −1674 | −654 | −644 | −952 | −2187 | −1810 | 553 |
| — | −149 | −500 | 233 | 43 | −381 | 399 | 106 | −626 | 210 | −466 | −720 | 275 | 394 | 45 | 96 | 359 | 117 | −369 | −294 | −249 | |
| — | −16 | −7108 | −8150 | −894 | −1115 | −701 | −1378 | * | * | | | | | | | | | | | | |
| 548(K) | −2620 | −2961 | −2461 | −2046 | −3743 | −2791 | −1570 | −3603 | 3784 | −3387 | −2839 | −2048 | −3039 | −1260 | −465 | −2604 | −2536 | −3331 | −3001 | −2988 | 554 |
| — | −149 | −500 | 233 | 43 | −381 | 399 | 106 | −626 | 210 | −466 | −720 | 275 | 394 | 45 | 96 | 359 | 117 | −369 | −294 | −249 | |
| — | −16 | −7108 | −8150 | −894 | −1115 | −701 | −1378 | * | * | | | | | | | | | | | | |
| 549(Y) | −3621 | −2707 | −4176 | −4424 | 2950 | −4049 | −394 | −2539 | −4002 | −1942 | −1987 | −2749 | −3933 | −2854 | −3451 | −3299 | −3499 | −2690 | 349 | 4094 | 555 |
| — | −149 | −500 | 233 | 43 | −381 | 399 | 106 | −626 | 210 | −466 | −720 | 275 | 394 | 45 | 96 | 359 | 117 | −369 | −294 | −249 | |
| — | −16 | −7108 | −8150 | −894 | −1115 | −701 | −1378 | * | * | | | | | | | | | | | | |
| 550(A) | 3438 | −1472 | −2846 | −3040 | −3287 | −1726 | −2735 | −2840 | −3028 | −3257 | −2662 | −2236 | −2447 | −2798 | −2944 | −1216 | −1387 | −2183 | −3405 | −3320 | 556 |
| — | −149 | −500 | 233 | 43 | −381 | 399 | 106 | −626 | 210 | −466 | −720 | 275 | 394 | 45 | 96 | 359 | 117 | −369 | −294 | −249 | |
| — | −16 | −7108 | −8150 | −894 | −1115 | −701 | −1378 | * | * | | | | | | | | | | | | |
| 551(H) | −1741 | −2627 | −2070 | −1046 | −3303 | −2401 | 2713 | −2751 | 2478 | −2476 | −1755 | −1061 | −2375 | −27 | 2379 | −1621 | −1497 | −2477 | −2379 | −2161 | 557 |
| — | −149 | −500 | 233 | 43 | −381 | 399 | 106 | −626 | 210 | −466 | −720 | 275 | 394 | 45 | 96 | 359 | 117 | −369 | −294 | −249 | |
| — | −16 | −7108 | −8150 | −894 | −1115 | −701 | −1378 | * | * | | | | | | | | | | | | |
| 552(L) | −1014 | −876 | −2956 | −2408 | −582 | −2550 | −1529 | 1721 | −2079 | 2042 | 345 | −2114 | −2581 | −1775 | −2028 | 454 | −980 | 286 | −1414 | −1096 | 558 |
| — | −149 | −500 | 233 | 43 | −381 | 399 | 106 | −626 | 210 | −466 | −720 | 275 | 394 | 45 | 96 | 359 | 117 | −369 | −294 | −249 | |
| — | −16 | −7108 | −8150 | −894 | −1115 | −701 | −1378 | * | * | | | | | | | | | | | | |
| 553(V) | 933 | −842 | −2818 | −2467 | −1542 | −1870 | −1890 | 154 | −2226 | −1095 | −617 | −1932 | −2326 | −1995 | −2259 | −1126 | 1070 | 2769 | −2180 | −1826 | 559 |
| — | −149 | −500 | 233 | 43 | −381 | 399 | 106 | −626 | 210 | −466 | −720 | 275 | 394 | 45 | 96 | 359 | 117 | −369 | −294 | −249 | |
| — | −16 | −7108 | −8150 | −894 | −1115 | −701 | −1378 | * | * | | | | | | | | | | | | |
| 554(S) | −787 | −1522 | −1486 | −1172 | −2714 | −1599 | −1112 | −2500 | −433 | −2563 | −1791 | −1110 | −2067 | −796 | 1351 | 2916 | −989 | −1943 | −2648 | −2234 | 560 |
| — | −149 | −500 | 233 | 43 | −381 | 399 | 106 | −626 | 210 | −466 | −720 | 275 | 394 | 45 | 96 | 359 | 117 | −369 | −294 | −249 | |
| — | −16 | −7108 | −8150 | −894 | −1115 | −701 | −1378 | * | * | | | | | | | | | | | | |
| 555(S) | −326 | −1010 | −1779 | −1541 | −2691 | −1234 | −1566 | −2386 | −1486 | −2594 | −1749 | −1228 | 1196 | −1330 | −1747 | 2396 | 1967 | −1662 | −2876 | −2496 | 561 |
| — | −149 | −500 | 233 | 43 | −381 | 399 | 106 | −626 | 210 | −466 | −720 | 275 | 394 | 45 | 96 | 359 | 117 | −369 | −294 | −249 | |
| — | −16 | −7108 | −8150 | −894 | −1115 | −701 | −1378 | * | * | | | | | | | | | | | | |
| 556(A) | 3121 | −934 | −2489 | −2561 | −3081 | −1203 | −2295 | −2766 | −2533 | −3080 | −2234 | −1669 | −1953 | −2234 | −2533 | 936 | −746 | −1844 | −3331 | −3090 | 562 |
| — | −149 | −500 | 233 | 43 | −381 | 399 | 106 | −626 | 210 | −466 | −720 | 275 | 394 | 45 | 96 | 359 | 117 | −369 | −294 | −249 | |
| — | −16 | −7108 | −8150 | −894 | −1115 | −701 | −1378 | * | * | | | | | | | | | | | | |
| 557(S) | −897 | −1462 | −2333 | −2543 | −3185 | −1640 | −2474 | −3294 | −2686 | −3497 | −2780 | −1973 | −2360 | −2483 | −2703 | 3465 | −1316 | −2413 | −3310 | −3025 | 563 |
| — | −149 | −500 | 233 | 43 | −381 | 399 | 106 | −626 | 210 | −466 | −720 | 275 | 394 | 45 | 96 | 359 | 117 | −369 | −294 | −249 | |
| — | −16 | −7108 | −8150 | −894 | −1115 | −701 | −1378 | * | * | | | | | | | | | | | | |
| 558(R) | −586 | −1873 | −516 | 979 | −2188 | −1543 | −123 | −1869 | 1290 | −353 | −980 | −202 | −1622 | 314 | 1886 | −491 | 782 | −1495 | −2024 | −1439 | 564 |
| — | −149 | −500 | 233 | 43 | −381 | 399 | 106 | −626 | 210 | −466 | −720 | 275 | 394 | 45 | 96 | 359 | 117 | −369 | −294 | −249 | |
| — | −16 | −7108 | −8150 | −894 | −1115 | −701 | −1378 | * | * | | | | | | | | | | | | |
| 559(G) | −2594 | −2690 | −3304 | −3623 | −4328 | 3747 | −3462 | −4761 | −3953 | −4671 | −4212 | −3320 | −3352 | −3748 | −3779 | −2839 | −2981 | −4004 | −3668 | −4222 | 565 |
| — | −149 | −500 | 233 | 43 | −381 | 399 | 106 | −626 | 210 | −466 | −720 | 275 | 394 | 45 | 96 | 359 | 117 | −369 | −294 | −249 | |
| — | −16 | −7108 | −8150 | −894 | −1115 | −701 | −1378 | * | * | | | | | | | | | | | | |
| 560(C) | 2804 | 3772 | −3185 | −3198 | −2739 | −1303 | −2462 | −2065 | −2882 | −2628 | −1924 | −1927 | −2044 | −2547 | −2727 | −661 | −799 | −1463 | −3099 | −2886 | 566 |
| — | −149 | −500 | 233 | 43 | −381 | 399 | 106 | −626 | 210 | −466 | −720 | 275 | 394 | 45 | 96 | 359 | 117 | −369 | −294 | −249 | |
| — | −16 | −7108 | −8150 | −894 | −1115 | −701 | −1378 | * | * | | | | | | | | | | | | |
| 561(V) | −1771 | −1603 | −3750 | −3689 | −2037 | −3050 | −3231 | 403 | −3479 | −1154 | −1076 | −3246 | −3399 | −3383 | −3437 | −2628 | −1917 | 3536 | −3074 | −2677 | 567 |
| — | −149 | −500 | 233 | 43 | −381 | 399 | 106 | −626 | 210 | −466 | −720 | 275 | 394 | 45 | 96 | 359 | 117 | −369 | −294 | −249 | |
| — | −16 | −7108 | −8150 | −894 | −1115 | −701 | −1378 | * | * | | | | | | | | | | | | |
| 562(T) | −1213 | −1674 | −2755 | −2906 | −3163 | −1922 | −2659 | −2698 | −2788 | −3105 | −2612 | −2311 | −2600 | −2708 | −2753 | −1463 | 3819 | −2197 | −3286 | −3156 | 568 |
| — | −149 | −500 | 233 | 43 | −381 | 399 | 106 | −626 | 210 | −466 | −720 | 275 | 394 | 45 | 96 | 359 | 117 | −369 | −294 | −249 | |
| — | −16 | −7108 | −8150 | −894 | −1115 | −701 | −1378 | * | * | | | | | | | | | | | | |
| 563(D) | −2784 | −3432 | 4016 | −1200 | −4140 | −2466 | −2197 | −4505 | −2621 | −4365 | −3956 | −1551 | −3014 | −2039 | −3232 | −2593 | −2938 | −4046 | −3710 | −3552 | 569 |
| — | −149 | −500 | 233 | 43 | −381 | 399 | 106 | −626 | 210 | −466 | −720 | 275 | 394 | 45 | 96 | 359 | 117 | −369 | −294 | −249 | |
| — | −21 | −6715 | −7757 | −894 | −1115 | −701 | −1378 | * | * | | | | | | | | | | | | |
| 564(F) | −525 | −445 | −2202 | −1627 | 1946 | −2001 | −744 | 1247 | −1346 | 952 | 561 | 1079 | −2030 | −1067 | −1362 | −1067 | −465 | 338 | −714 | −230 | 570 |
| — | * | * | * | * | * | * | * | * | * | * | * | * | * | * | * | * | * | * | * | * | |
| — | * | * | * | * | * | * | * | * | 0 | | | | | | | | | | | | |

The application's sequence listing, which the Patent Office published only in electronic form, follows.

SEQUENCE LISTING (202 sequences)

SEQ ID NO: 1 - DNA, 2340 bp, Saccharomyces cerevisiae
atggtttacactccatccaagggtccaagaactctttacgataaggtttttgatgcacatgttgtccatcaagatgaaaatggttcctttttgttgtatatcgacagacacttggttcatgaagtcacctctccacaagctttcgaaggcctagaaaatgccggcagaaaggtcagaagagttgattgtactctagctactgtagatcataatattccaactgaatcaagaaagaatttcaaatcactagacacatttatcaagcaaactgattcgcgtttacaagtcaaaactttagagaataatgttaaacagttcggcgttccatatttcggtatgagtgatgccagacaaggtatcgtccacaccatcggtcccgaagaaggtttcactttaccaggtaccactgttgtttgtggtgactctcatacctctactcacggtgcctttggttcgctggcctttggtattggtacttctgaagttgaacacgtcttggccactcaaacaattatccaagctaaatcgaaaaacatgagaattactgttaatggtaagctatcacctggtatcacatctaaagatttgattttgtatattattggtctgataggtactgcaggtggtactggttgcgttattgaattcgcaggtgaagccattgaagctctttctatggaagcacgtatgtccatgtgtaacatggccatcgaagctggtgcaagagcaggtatgattaaaccagacgaaactactttccaatacaccaaaggcagacctttggctccaaaaggtgccgaatgggaaaaggctgttgcctactggaaaactttgaaaacagacgaaggtgccaaatttgaccacgaaatcaacattgaagctgtcgacgtgattccaactattacatggggtacttctcctcaagatgccttaccaattactggttccgtaccagatccaaaaaatgttacagacccaataaagaaatctggtatggaaagagccttagcctatatgggtttggaacctaacacaccgctaaagagcatcaaagtagataaagtctttattggatcttgtaccaatggccgtattgaagatttaagaagtgctgcagctgtagttaggggtcaaaaattggctagtaacatcaaattagctatggttgttccgggatctggtttggtcaaaaaacaagccgaagcagaaggtttggacaagattttccaagaagctggttttgaatggagagaagctggttgttcaatatgtttaggtatgaaccctgatattttggatgcctatgaacgttgtgcttctacttccaacagaaatttcgaaggtcgtcaaggtgccttgtctcgtacacatctaatgtccccagccatggcggctgctgcaggtatcgcaggtcacttcgtagatattagagaattcgaatataaggatcaagaccaaagtagtccaaaggttgaggtcacttccgaagatgaaaaagagcttgaaagtgctgcttacgatcacgctgaacctgtccaacccgaagacgctccccaagatattgccaatgatgaattaaaagatattccagtgaagtcagatgatacacctgctaaacctagctcttccggcatgaagccatttttgactttggaaggtattagcgcaccattagataaggccaatgttgatacagacgctattatcccaaagcaatttttaaagacaattaagagaacgggtttgaaaaaagggttgttttatgaatggcgtttccgtaaagacgatcaaggtaaggatcaagaaaccgattttgtattaaatgttgaaccttggagggaagctgaaatattggttgttactggtgacaatttcggatgtggttcttccagagaacacgcaccatgggctctaaaagactttggtataaaatccatcattgcaccttcttacggtgatattttctacaacaactctttcaagaacggcttattacctattagattggatcaacaaataatcattgacaaattgatccctattgctaataagggtggtaagctctgcgtcgatttaccaaatcaaaaaattttggattccgatggcaatgtgctcgttgatcattttgaaatagaacctttcagaaagcactgcctagttaacggtcttgatgatattggtattacattgcaaaaggaagaatacatttccagatacgaagctttgagaagagagaaatactcattcttggaaggtggatcaaaattattaaaatttgacaacgttccaaaaagaaaagctgttacaactactttcgataaagtccaccaggattggtag

SEQ ID NO: 2 - protein, 779 aa, Saccharomyces cerevisiae
MVYTPSKGPRTLYDKVFDAHVVHQDENGSFLLYIDRHLVHEVTSPQAFEGLENAGRKVRRVDCTLATVDHNIPTESRKNFKSLDTFIKQTDSRLQVKTLENNVKQFGVPYFGMSDARQGIVHTIGPEEGFTLPGTTVVCGDSHTSTHGAFGSLAFGIGTSEVEHVLATQTIIQAKSKNMRITVNGKLSPGITSKDLILYIIGLIGTAGGTGCVIEFAGEAIEALSMEARMSMCNMAIEAGARAGMIKPDETTFQYTKGRPLAPKGAEWEKAVAYWKTLKTDEGAKFDHEINIEAVDVIPTITWGTSPQDALPITGSVPDPKNVTDPIKKSGMERALAYMGLEPNTPLKSIKVDKVFIGSCTNGRIEDLRSAAAVVRGQKLASNIKLAMVVPGSGLVKKQAEAEGLDKIFQEAGFEWREAGCSICLGMNPDILDAYERCASTSNRNFEGRQGALSRTHLMSPAMAAAAGIAGHFVDIREFEYKDQDQSSPKVEVTSEDEKELESAAYDHAEPVQPEDAPQDIANDELKDIPVKSDDTPAKPSSSGMKPFLTLEGISAPLDKANVDTDAIIPKQFLKTIKRTGLKKGLFYEWRFRKDDQGKDQETDFVLNVEPWREAEILVVTGDNFGCGSSREHAPWALKDFGIKSIIAPSYGDIFYNNSFKNGLLPIRLDQQIIIDKLIPIANKGGKLCVDLPNQKILDSDGNVLVDHFEIEPFRKHCLVNGLDDIGITLQKEEYISRYEALRREKYSFLEGGSKLLKFDNVPKRKAVTTTFDKVHQDW

SEQ ID NO: 3 - DNA, 1116 bp, Schizosaccharomyces pombe
atgtgtgcaaagaaaatcgtcgtcttaccaggagaccatattggccctgaaattgttgcttctgccttggaggttttgaaagtcgttgagaagaagcgacctgagttaaaactcgagtttgaagaacacaagattggaggtgcctctattgatgcctatggaacccctttgactgacgagactgtgaaggcttgtttggaagctgacggtgttcttttgggtgccgttggtggtcctgaatggaccaaccccaattgtcgtcctgagcaaggtttattgaagcttcgtaagagtatgggtgtttgggccaaccttcgaccttgcaactttgccagcaagtctttagtcaagtacagccctttgaagcctgaaatcgttgaaggtgtcgatttttgtgttgtacgagaacttactggaggttgttactttggtgagcgcactgaggacaacggatcgggttatgctatggacacttggccttacagtttggaagaagtttctcgtattgctcgtttggctgcttggttagctgaaacttccaaccctcctgctcccgtcacattactcgacaaagctaatgttttggcaacttctcgtctttggcgcaagactgtagctaagatttttaaggaggaatatcctcaccttaccttaaaaaaccagctcattgactccgcagccatgcttttggtcaagagccctcgtacacttaacggtgttgttttgactgacaacttgtttggtgacattatttcagatgaggcttctgtcattcctggtagcttgggccttttgccttctgcctccctttccggtgtggtaggaaaatcagaagaaaaggttcattgtttggttgagcccattcacggtagcgctcccgatatcgctggcaagggcattgttaatcctgttggtacaattttatctgcttcccttctccttcgttatggtttgaatgctcctaaggaggctgaagctatcgaagccgccgtacgcaaggtcttggatgatacttcaattggtggacgtggtctttatactcgcgatttgggaggtgaggcttctaccgctgatattactaaggctgttgttgaagaacttgaaaaaattttgtaa

SEQ ID NO: 4 - protein, 371 aa, Schizosaccharomyces pombe
MCAKKIVVLPGDHIGPEIVASALEVLKVVEKKRPELKLEFEEHKIGGASIDAYGTPLTDETVKACLEADGVLLGAVGGPEWTNPNCRPEQGLLKLRKSMGVWANLRPCNFASKSLVKYSPLKPEIVEGVDFCVVRELTGGCYFGERTEDNGSGYAMDTWPYSLEEVSRIARLAAWLAETSNPPAPVTLLDKANVLATSRLWRKTVAKIFKEEYPHLTLKNQLIDSAAMLLVKSPRTLNGVVLTDNLFGDIISDEASVIPGSLGLLPSASLSGVVGKSEEKVHCLVEPIHGSAPDIAGKGIVNPVGTILSASLLLRYGLNAPKEAEAIEAAVRKVLDDTSIGGRGLYTRDLGGEASTADITKAVVEELEKIL

SEQ ID NO: 5 - DNA, 2355 bp, Candida galbrata
atggttactacagagactaaaggtcctaggaccctatatgataaagtatttgatgcgcatgtggtgcacaaggatgagaatggctcttacttgttgtacattgacagacatctagtgcacgaggttacttctccacaggcctttgaaggtttgactaatgcgaacagaccagtaagaagggtggattgtactttggccacagttgaccacaacatcccaaccgagtccagaaagagtttcaagaacttggactctttcattacacaaaccgactcccgcttacaagtgaagactttggaacagaacgtcaagcaatttggcgtaccatactttggtctaaccgagaagagacaaggtatcgtccatactattggtcctgagcaaggtttcaccttacctggtaccactgtggtgtgtggtgactcccacacttctactcacggtgcattcggtgcattggcattcggtatcggtacctccgaagtcgaacacgtcttggctacccaaactatcattcaaagtaaatccaagaatatgagaattagagtcgacggtaagttaagcccaggtattacatctaaggatttgattcttcatatcattggtgtgatcggtactgctggtggtactggttccgtcattgaatttgctggtgaagctatagagaacttatctatggaagctcgtatgtctatgtgtaatatgtccattgaggccggtgcaagagctggtatgatcaaaccagacaatgtcactttcgaatatttcaaaggaagaccattggccccaactggtgccgaatgggacaaggctgttgcttactggaagactttgcattctgatgagggcgccaaattcgatcacgaaatcgtcatcaaaggttcagaaattattccaactattacctggggtacttctccacaagatgcgctaccaatcagtgcatcagttccagatccagctaatgtagatgatccaatcaagaagtccggtatggagagagctctcgaatacatgggcttgaaaccaaacactccattgaagagtatctatgtcgacaaggtcttcattggttcatgtactaatggccgtattgaagatttgagaaatgccgctaaggtcttaaatggtcataagattgccccaaatatcaagagagctatggttgtcccaggatccggtttagtcaaggtacaagccgaagaagaagggcttgataaagttttcattgcagctggctttgaatggagagaagctggctgttctatgtgtctaggtatgaacccagatattttggacaagtacgaacgttgtgcttccacttccaacagaaactttgaaggtcgtcaaggtgccttatctcgtacacatttaatgtctccagccatggctgctgctacagctgttgcaggtcactttgtagacatcagagaatttaaatataataacgctgacgatgctaaagttactatatcttctgatgaagacgaagaacttgaagaagctgcgtatgagcacactgaaccacaacagcccggtgatgccccaactgatgttgagaatgatcagttgaaggacatcccagtcgaatccgaaacaaaaagattaaagacggacgatactaagccagttgctggtggtatggacccatttgtcgttttgaatggtttggctgctccacttgaaaaggctaacgttgatactgatgctattattccaaaacaattcttgaaaacaattaagagaaccggtttgagatcaggtctattttacgaatggagatttgtcaaggatgacagtggaaaagataaagaaacagattttgtgttgaatgtcaacccatggaggaaagctgaggtcctcgttgttactggtgacaactttggttgtggttcctctagagaacacgccccatgggctttgaaagattttggtatcaagtcaattattgctccatctttcggtgatattttctacaataacagtttcaagaatggtttgttaccaattagaattgatcaagataccatcgtaaacaagctagttcctgttgcaaaggctggtaagaatctcgttattaacttaccagatcaaaccatctctgattcggatggcaatgttttggttgaacattttgaagttgaagcattcagaaagcattgtctagtaaatggtctagatgacattggcatcacattgcagaaagaacaatacatcgaccaatacgaaaagattagaagagaaaagtactcattttatgaaggtggttctaagttgctacacttcccagccaagcagttcccaaaaaagagaactccattaacgacttatgacactgttcatcaagattggtaa

SEQ ID NO: 6 - protein, 784 aa, Candida galbrata
MVTTETKGPRTLYDKVFDAHVVHKDENGSYLLYIDRHLVHEVTSPQAFEGLTNANRPVRRVDCTLATVDHNIPTESRKSFKNLDSFITQTDSRLQVKTLEQNVKQFGVPYFGLTEKRQGIVHTIGPEQGFTLPGTTVVCGDSHTSTHGAFGALAFGIGTSEVEHVLATQTIIQSKSKNMRIRVDGKLSPGITSKDLILHIIGVIGTAGGTGSVIEFAGEAIENLSMEARMSMCNMSIEAGARAGMIKPDNVTFEYFKGRPLAPTGAEWDKAVAYWKTLHSDEGAKFDHEIVIKGSEIIPTITWGTSPQDALPISASVPDPANVDDPIKKSGMERALEYMGLKPNTPLKSIYVDKVFIGSCTNGRIEDLRNAAKVLNGHKIAPNIKRAMVVPGSGLVKVQAEEEGLDKVFIAAGFEWREAGCSMCLGMNPDILDKYERCASTSNRNFEGRQGALSRTHLMSPAMAAATAVAGHFVDIREFKYNNADDAKVTISSDEDEELEEAAYEHTEPQQPGDAPTDVENDQLKDIPVESETKRLKTDDTKPVAGGMDPFVVLNGLAAPLEKANVDTDAIIPKQFLKTIKRTGLRSGLFYEWRFVKDDSGKDKETDFVLNVNPWRKAEVLVVTGDNFGCGSSREHAPWALKDFGIKSIIAPSFGDIFYNNSFKNGLLPIRIDQDTIVNKLVPVAKAGKNLVINLPDQTISDSDGNVLVEHFEVEAFRKHCLVNGLDDIGITLQKEQYIDQYEKIRREKYSFYEGGSKLLHFPAKQFPKKRTPLTTYDTVHQDW

SEQ ID NO: 7 - DNA, 2331 bp, Candida albicans
atggctcctaaaacattatacgacaaggtctttgaagaccatatagttcataaagacgattctggttcatatttattatacattgatagacatttagtccatgaggttacttccccacaagcatttgaagggttaaagaatgctggtcgttcagtcagaagaaccgattgtacattagccacagttgatcataatatcccaactatttcaagagcaaatttcaagaatgtcgattcattcatagagcaagatgattctagattgcaagttaagactttagaacaaaacgtcaaggattttgatgttacttattttggtatgacagacgacagacaaggtattgtccatgttgttggtccagaacaaggtttcactttaccaggtaccactgttgtttgtggtgactcccatacttctactcatggtgcctttggttcattggcttttggtattggtacttctgaagtggaacatgttttagctacgcaaactattattcaagccaaatcgaaaaacatgagaattactattgatggtgatttgtctgaaggtatcacttcgaaagatttggttttgcatgtcattggtgttattggtactgctggtggtactggttgtgttattgaatttgctggtaaagccattgagaatttgtcaatggaagcaagaatgtcgatatgtaatatggccattgaagccggtgccagagctggtatgatcaaaccagatgatactacattcaattacatcaaaggtagaccattggctccaaagggacaagaatgggaaaaggccatgaaatattggaaaactttacatactgatgaaggagctaagtttgattacgatattaaaattgctgcttccgatattgttccaactatcacttggggtaactcaccacaagatgcgttaccaataactgctagtgtcccagacccagcaactgtgaccgatccaattaagaaatcgggtatggaaagagcattgaaatatcaaggtttaactccaaacacacctttcaaagaaatcaaaattgataaagcattcattggttcatgtaccaactctcgtattgaagatttaagagcagctgctaaagttgccaaaggtcacaaaaaagccgacaatgtgaaattggtcttggtggtgccgggttctggtttaattaaaaagcaagctgaaaaagaaggtttggataagatttttgaagccgctggattttcatggagagaagccggatgttcaatgtgtcttggtatgaacccagatattttggatcctgaagaaagatgtgcttctacttccaacagaaatttcgaaggtcgtcaaggtgctctttcaagaacccatttgatgtcaccagccatggctgctgctgctgctattaaaggtcatttcactgatattagagaatttgactatgccacacaagatgaacctcaaatacaaattgctcatgaaattgaagacaaagaattacaagaagctgtttatgagcacgaaaaggaatacattgaagataccccagaaactcaagcagaaagacttgaagacattccaaaagatgaaccagaatttaaaagggccagaaccgagatcgacaactctgctgctggtactcctagtattgataacagtttcaaagttttaactggtattactgctccattatacaaagccaatgttgatactgatgccattattccaaaacaatttttgaaaacaatcaagagaaccggattaaaagatggtttgttttatgaattgagatttgttaaaggtgaaaatggtaaagatgtggaaactgattttgtattgaatactgaaccatatagaaaggcagaaattttattggtgacaggagacaattttggttgtggatcaagtcgtgagcatgctccttgggctttgaaagattttggtatcaaaagtataattgccccatcatttggtgatatcttttataataattcttttaaaaatttccttttgccaatcagaataccgcaagaaatcattgaatctaaattggttcccgttgttacatcaggtcatagattgacgatagatttgccaaaccagcaaatcagagacggtgaaaccgacgaagtcttgattgaacatttcgatgtggaagagtttagaaaacattgtttggtcaatggattagatgatattggtttgactttacaaaaagaagaatatattaaagaatatgaagctaaaagaagaatcaagttttctttcttggaaggaggttctaaattaatcaaacctataaaaggtactaaaaagagtatttacggtaacagagcacaagaatggtaa

SEQ ID NO: 8 - protein, 776 aa, candida albicans
MAPKTLYDKVFEDHIVHKDDSGSYLLYIDRHLVHEVTSPQAFEGLKNAGRSVRRTDCTLATVDHNIPTISRANFKNVDSFIEQDDSRLQVKTLEQNVKDFDVTYFGMTDDRQGIVHVVGPEQGFTLPGTTVVCGDSHTSTHGAFGSLAFGIGTSEVEHVLATQTIIQAKSKNMRITIDGDLSEGITSKDLVLHVIGVIGTAGGTGCVIEFAGKAIENLSMEARMSICNMAIEAGARAGMIKPDDTTFNYIKGRPLAPKGQEWEKAMKYWKTLHTDEGAKFDYDIKIAASDIVPTITWGNSPQDALPITASVPDPATVTDPIKKSGMERALKYQGLTPNTPFKEIKIDKAFIGSCTNSRIEDLRAAAKVAKGHKKADNVKLVLVVPGSGLIKKQAEKEGLDKIFEAAGFSWREAGCSMCLGMNPDILDPEERCASTSNRNFEGRQGALSRTHLMSPAMAAAAAIKGHFTDIREFDYATQDEPQIQIAHEIEDKELQEAVYEHEKEYIEDTPETQAERLEDIPKDEPEFKRARTEIDNSAAGTPSIDNSFKVLTGITAPLYKANVDTDAIIPKQFLKTIKRTGLKDGLFYELRFVKGENGKDVETDFVLNTEPYRKAEILLVTGDNFGCGSSREHAPWALKDFGIKSIIAPSFGDIFYNNSFKNFLLPIRIPQEIIESKLVPVVTSGHRLTIDLPNQQIRDGETDEVLIEHFDVEEFRKHCLVNGLDDIGLTLQKEEYIKEYEAKRRIKFSFLEGGSKLIKPIKGTKKSIYGNRAQEW

SEQ ID NO: 9 - DNA, 2358 bp, Kluyveromyces lactis
atgactgctcctgctgctaccgaatcaaacggtccacaaaccttgtatgacaaggttttccaggaccatattgtccataaggatgaatctggatcatatttgttgtatattgatagacatttggttcatgaagttacttctccacaagcttttgaaggtttaaagaatgctggtagaaaagttagaagagttgattgtaccttggctacagtggatcacaacatccctactgaatccagaaagaattttgtcgatactgcatctttcattaagcaagccgattcccgtttgcaagttcaaactttggaacaaaacgttaaggattttggagtcacattttttggtatgactgatgctagacaaggtatcgtgcatattattggtccagaacaaggtttcacattgccaggcaccactgtggtgtgtggtgattcccatacttctactcacggtgcgtttggtgcacttgcatttggtattggtacctctgaagttgagcacgtcttggctacccaaaccattattcaggccaagtcgaagaacatgagaatttacgttgatggtccattgtccccatcagtgacttctaaggatttgatcttacacatcatcggtgtcattggtactgcgggtggtactggttgtgttatcgaattcgcaggtcaagcaattgaggaactgtctatggaagcccgtatgtccatgtgtaatatggccatcgaaggtggtgccagagccggtttgattcaaccagatcaaactactttcgattacatcaagggtagacctttggctccaaagggcgctgaatggaacaaggctgtcgcctactggaagactttacacaccgatgaaggtgctcagtttgattacgatatcactattaaatcaactgatgtcatcccaacaatcacttggggtacttctccacaagatgcattgccaatcactgcctctgttccagatccggcaaccatctctgatcctgctgtaaaggctactgtggaaagagctttgaaatacatgggcttgactccaaacgttccattgaaagaactttctatcgataaggtctttatcggttcttgtaccaatgctagaattgaggatttgagagctgctgctgccgtcgttaagggacataagaaagctgataatgttaaattggctatggttgttccaggttctggtttggtgaagaaacaagctgaatctgaaggcttagacaagatttttgaggaagctggtttcgaatggagagaagctggttgttctatgtgtctaggtatgaacccagatattttggaccctgaagaacgttgtgcttctacttccaacagaaactttgaaggccgtcaaggtgctctatctagaactcatttaatgtctccagcaatggctgctgctgctggtattgctggtcatttcgttgacattagagatcatgaatacagaaacagcgatgttccaaaggtttccattgagcaagaagctgaagacaaaatcttgcaaaatgctgtctatgaacacgaaaaagaaccaatcgaagagggcgagtcagtggatgaacaagtcgatgatcaacaattggatatcccaccttctgatcatgtaacaaaggaaacccctctcaaagatgctccaacatctgctccaaaaggtatggatcctttcctaaaattggacggtattgctgctccagttgacaaggcgaacgttgacactgatgccatcattccaaaacaatttttgaagactattaagagaacaggtttgaagagtggtttgttctatgaatggaggttcaccaaaggtcctgacggtaaggatgtagaaactgattgggtcttgaacgttgaaccttggagaaatgctgaaatcttggtcattactggtgataactttggttgtggttcttccagagaacacgcaccatgggccttgaaggatttcggtatcaagtgtatgattgccccatctttcggtgacattttctacaacaattccttcaaaaacggtttgcttccaatcagacttcctgaagatttaatcgtagaaaagctttcgccattggcagaagctggtgctaaattgatagtcgatttaccatcgcagaagatcatggatgctgaaggtaatgttcttgtggatcatttcgatgttgagcctttcagaaaacactgtttggttaacggtcttgatgatattggtatcacaatgcagaaagaagagtacattgctaagtatgaagccatgagaagagacaggttctctttcttagaaggtggttccaaactaataaaacctatcaagggtactaagaagagtccatttggtaacagggctcaagagtggtaa

SEQ ID NO: 10 - protein, 785 aa, Kluyveromyces lactis
MTAPAATESNGPQTLYDKVFQDHIVHKDESGSYLLYIDRHLVHEVTSPQAFEGLKNAGRKVRRVDCTLATVDHNIPTESRKNFVDTASFIKQADSRLQVQTLEQNVKDFGVTFFGMTDARQGIVHIIGPEQGFTLPGTTVVCGDSHTSTHGAFGALAFGIGTSEVEHVLATQTIIQAKSKNMRIYVDGPLSPSVTSKDLILHIIGVIGTAGGTGCVIEFAGQAIEELSMEARMSMCNMAIEGGARAGLIQPDQTTFDYIKGRPLAPKGAEWNKAVAYWKTLHTDEGAQFDYDITIKSTDVIPTITWGTSPQDALPITASVPDPATISDPAVKATVERALKYMGLTPNVPLKELSIDKVFIGSCTNARIEDLRAAAAVVKGHKKADNVKLAMVVPGSGLVKKQAESEGLDKIFEEAGFEWREAGCSMCLGMNPDILDPEERCASTSNRNFEGRQGALSRTHLMSPAMAAAAGIAGHFVDIRDHEYRNSDVPKVSIEQEAEDKILQNAVYEHEKEPIEEGESVDEQVDDQQLDIPPSDHVTKETPLKDAPTSAPKGMDPFLKLDGIAAPVDKANVDTDAIIPKQFLKTIKRTGLKSGLFYEWRFTKGPDGKDVETDWVLNVEPWRNAEILVITGDNFGCGSSREHAPWALKDFGIKCMIAPSFGDIFYNNSFKNGLLPIRLPEDLIVEKLSPLAEAGAKLIVDLPSQKIMDAEGNVLVDHFDVEPFRKHCLVNGLDDIGITMQKEEYIAKYEAMRRDRFSFLEGGSKLIKPIKGTKKSPFGNRAQEW

SEQ ID NO: 11 - DNA, 2292 bp, Yarrowia lipolytica
atgggacaaacactctacgacaaggtctttgcggaccacgttgtccacgaggacaatggcacttaccttctgttcattgaccggcaccttgtgcacgaggtcacatctccgcaggcgtttgagggtctcaagaacgccggacgacaggtgcgacgtaaggactgcactctggccacggtcgaccacaacattcccaccacgacgcgaaaggacttcaagtcgatcggcacatttatcaaggaggaagactcgcggttgcagtgcacgactctggagcagaacgtcaaggactttggcgtgcggtactttggcatggacgacaagcgacagggaattgtgcacgttgtgggtcctgagcaaggcttcactctgcccggaaccaccgtggtttgcggcgactcgcacacctctacccatggtgcgttcggagctctggcgtttggaatcggaacctccgaggtcgagcacgtgctggcgacccagaccatcatccaggccaagtccaagaacatgcggatcaacgtctccggcaaactgcagccgggcatcacctccaaggatctgattctgcacattatcggcgtcattggcactgctggaggaactggaaccgtcatcgagttctgcggcgaggcgatccgagacctctccatggaggctcgaatgtccatgtgcaacatggcgattgagggaggagctcgagccggcatgatcgctcccgacgagaccaccttccggtacatccggggccgacctctggctcccgagggcgccgagtgggagaaggccgtcacctactggaagactctgcattcggactcggacgcggagttcgatattgacgtcaacatcaagggcgaggacattatccccaccgtcacctggggtacctctcctcaggacgctctgcccatcacgggctccgttcccgacccctccaaggagaccgatcccatcaagcgggccggaatcgagcgtgcgctggagtacatgggtctggaggccaacactcccctcaacgagattgctgtggacaaggtcttcattggatcctgtaccaactcgcgaatcgaggatctgcgggccgccgctgccattgttcggggaaaaaagaaggccgactccgtggtgcgagccatggttgtgccgggctccggtctggtcaagcgaaaggccgaagccgagggtctggacaaggtctttgaggctgcgggcttcgaatggcgagaggctggctgttccatgtgtctgggtatgaaccctgacattctcaacccccgcgagcgatgtgcttccacctccaaccgtaactttgagggtcgacagggtgctctttcgcgcacccatctggtttcgcccgccatggcggctctggctggaatcaccggcaagctgactgacgtgcgggactacctgcccaaggacgaggccaagattgtgattggcgaggacgaggagatggctgaggccaagtatgacgaggagaaacagcccgccgtcaagaaaatgaagaccgccaccgtgacccaggcggaccctgtcgatgagcagaccgacgccgtggccgaggaaaacatcacctcgtcagccaccggcatccccaagttcctggaggtatctggaatcgccgcgcctctgcccaaggccaacgtggacaccgacgccatcatccccaagcagttcctcaagaccatcaagcgaactggactgtcctcgggtctctttttcgagtggcgattcaaggaggtggacggcaagcaggagaagaccgactttatgctcaacgtggctccctgggataaggcttcgattctggttgtttccggcgacaactttggctgtggctcttcccgagaacacgctccctgggctctggccgactttggcatccggtgcatcattgctccttcttttggcgacattttctacaacaactcgttcaagaacggcctgctgcccatccgggtcgacgccgacgtcatcaagtccaagctcatgcccgtggccgacaagggcggctctctgaccgtggatctgcccaaccagaaggtgctgcatggcgacgaggtgctggtggaccactttgaggtcgaggacttccgaaagcactgtctggtcaacggtctggacgatatcggactcaccatgcagaaggaggagttcatcaaggcctacgaggccaagcgatctgataagttctccttccttgagtccaacaccgactctctcattgtcaaccccgtcaagggtaccaagaagtctgctcttggagtcactgcccaggagtggtag

SEQ ID NO: 12 - protein, 763 aa, Yarrowia lipolytica
MGQTLYDKVFADHVVHEDNGTYLLFIDRHLVHEVTSPQAFEGLKNAGRQVRRKDCTLATVDHNIPTTTRKDFKSIGTFIKEEDSRLQCTTLEQNVKDFGVRYFGMDDKRQGIVHVVGPEQGFTLPGTTVVCGDSHTSTHGAFGALAFGIGTSEVEHVLATQTIIQAKSKNMRINVSGKLQPGITSKDLILHIIGVIGTAGGTGTVIEFCGEAIRDLSMEARMSMCNMAIEGGARAGMIAPDETTFRYIRGRPLAPEGAEWEKAVTYWKTLHSDSDAEFDIDVNIKGEDIIPTVTWGTSPQDALPITGSVPDPSKETDPIKRAGIERALEYMGLEANTPLNEIAVDKVFIGSCTNSRIEDLRAAAAIVRGKKKADSVVRAMVVPGSGLVKRKAEAEGLDKVFEAAGFEWREAGCSMCLGMNPDILNPRERCASTSNRNFEGRQGALSRTHLVSPAMAALAGITGKLTDVRDYLPKDEAKIVIGEDEEMAEAKYDEEKQPAVKKMKTATVTQADPVDEQTDAVAEENITSSATGIPKFLEVSGIAAPLPKANVDTDAIIPKQFLKTIKRTGLSSGLFFEWRFKEVDGKQEKTDFMLNVAPWDKASILVVSGDNFGCGSSREHAPWALADFGIRCIIAPSFGDIFYNNSFKNGLLPIRVDADVIKSKLMPVADKGGSLTVDLPNQKVLHGDEVLVDHFEVEDFRKHCLVNGLDDIGLTMQKEEFIKAYEAKRSDKFSFLESNTDSLIVNPVKGTKKSALGVTAQEW

SEQ ID NO: 13 - DNA, 2313 bp, Pichia stipitis
atggcacccagaacattatacgacaaggtctttgaagaccatattgtccacaaggacgaatctggatcgtatctcttatacatagacagacatttagttcacgaagtgacatctccacaggcttttgaaggtttgaagaatgctggaagacctgtcagaagaaccgattgtactttagcaactgttgaccacaatatccccactatttctcgtgtcaacttcaagaacgtcagttcgttcatagaccaggacgattcaagattacaagtggaaaccttggaacagaacgtcaaggactttgacgtgacctattttggcatggacgattccagacagggtattgttcacattgtcggcccagaacaagggttcactttgcctggtaccacagttgtttgtggtgactctcacacttctacccatggtgccttcggggctttggctttcggaattggtacctctgaagtcgagcatgtcttggcaacccagacgattatccaggccaagtctaagaacatgagaatctctgtagagggtgatttgtccgaaggaatcacttctaaggacttggtcttgcatgtcattggtgtcattggtactgccggtggtactggttgtgtcatcgagtttgctggtaaggcaattgaaagtttgtcaatggaagccagaatgtccatctgcaacatggctattgaagccggagcacgtgctggtatgatcaagccagatcagactacctttgactacatcagtggtagaccattagctcctaagggagctgaattagagaaagcattggcttactggaaaactttgcattctgatgaaggtgctcattttgattacgacatcaagatcgctgcttcagatatcgtgcctacaatcacatggggtaactcacctcaggatgccctccctatcactgccagtgttccagacccagcacatgtgactgaccctatcaagaaatcaggtatggaaagagccttgaagtaccagggcttaactcctaacacccgtttggtagatatcaagattgacaaggcctttattggttcgtgtactaacgcccgtatcgaggacttgagagctgctgccaaggtcgctaagggccacaagaaggctgacaacgtcaagttggttcttatcgttcctggatctggattgatcaaagcccaggctgagaaggaaggtttggacaagatctttgaagctgctggtttctcgtggagagaagccggttgttcgatgtgtcttggtatgaacccagatattttagatcctgaagagagatgtgcttctacgtctaacagaaacttcgagggtcgtcaaggtgctcgttccagaacacatttgatgtctcctgccatggctgctgctgctgctatcaaaggtcacttcactgatatccgtgaattcgactacgatacatctgatgaacctgctgttcacattgaacacgaagtcgaagacaaacttctccaagatgctgtgtacgaacacgaaaaggaagtcattgaagacactccaggaacagaacaggaaagactttatgacattcctaaggaaccagaatccaagaaggccaagactgctgctccatctggaggaattgacaagtttggtgttctcactggtattactgctcctttggacaaagctaacgtcgacactgatgctatcattcctaagcagttcttgaagaccattaagagaactggtttgaagtcaggtttattctacgaagccagatacgtgaaggaccctgtaactggcaaagacgttgaaacagactttgttttgaacgtagagccataccgtaaggctgagatcttgttagtcactggtgacaactttgggtgtggttcttcgagagaacacgctccatgggctctcaaggactttggtatcaagtgtatgattgccccatcctttggtgatatcttctacaataattcgttcaagaacggtttgttgcccattagaattcctgctgatgtgattcaatccactttatatcctgtcgtcactgctggccacaaattgactatcgacttgcctgcccagcaaattagagatggagaaaccgacgaagtcttggtggaccactttgacgtcgaagaattcagaaagcattgcttagttaatggtttggacgatattggcttgaccttacagaaggaagagttcatcagcaagtacgaagctgtcagaagagagaagttctccttcttagaaggtggctccaagttaatcaagcctatcaaaggtaccaagaagtctatctatggtgtcaaagcacaagaatggtga

SEQ ID NO: 14 - protein, 770 aa, Pichia stipitis
MAPRTLYDKVFEDHIVHKDESGSYLLYIDRHLVHEVTSPQAFEGLKNAGRPVRRTDCTLATVDHNIPTISRVNFKNVSSFIDQDDSRLQVETLEQNVKDFDVTYFGMDDSRQGIVHIVGPEQGFTLPGTTVVCGDSHTSTHGAFGALAFGIGTSEVEHVLATQTIIQAKSKNMRISVEGDLSEGITSKDLVLHVIGVIGTAGGTGCVIEFAGKAIESLSMEARMSICNMAIEAGARAGMIKPDQTTFDYISGRPLAPKGAELEKALAYWKTLHSDEGAHFDYDIKIAASDIVPTITWGNSPQDALPITASVPDPAHVTDPIKKSGMERALKYQGLTPNTRLVDIKIDKAFIGSCTNARIEDLRAAAKVAKGHKKADNVKLVLIVPGSGLIKAQAEKEGLDKIFEAAGFSWREAGCSMCLGMNPDILDPEERCASTSNRNFEGRQGARSRTHLMSPAMAAAAAIKGHFTDIREFDYDTSDEPAVHIEHEVEDKLLQDAVYEHEKEVIEDTPGTEQERLYDIPKEPESKKAKTAAPSGGIDKFGVLTGITAPLDKANVDTDAIIPKQFLKTIKRTGLKSGLFYEARYVKDPVTGKDVETDFVLNVEPYRKAEILLVTGDNFGCGSSREHAPWALKDFGIKCMIAPSFGDIFYNNSFKNGLLPIRIPADVIQSTLYPVVTAGHKLTIDLPAQQIRDGETDEVLVDHFDVEEFRKHCLVNGLDDIGLTLQKEEFISKYEAVRREKFSFLEGGSKLIKPIKGTKKSIYGVKAQEW

SEQ ID NO: 15 - DNA, 2532 bp, Roseburia inulinivorans
atgggcaattacgattcaacaccgatagctaaaagtgataggattaaaagattggttgatcatttgtatgctaaaatgcctgaaattgaggccgctagagcagagctaattactgaatcctttaaggccaccgaaggtcaacctgttgttatgagaaaggctagagcttttgaacatatactaaagaatttgccaattatcataagaccagaagaactgattgttggctcaactacaattgcccctagaggttgccaaacgtatccagaattctcatacgagtggttagaggctgaatttgaaactgtcgaaacgcgttcagctgacccattttatatttcagaagaaacgaagaaacgtttgctggctgccgatgcttattggaaaggtaaaacaacctcagagttggcaacttcatatatggccccagaaactctaagagccatgaagcataacttcttcacccctggaaactacttctacaatggtgtcggtcatgtcacagttcaatatgaaacagtattagcaatcggcttgaatggagtaaaagagaaggttaggaaagagatggagaattgtcattttggtgatgccgattatagtacaaagatgtgtttcttggagagcattttaatatcgtgtgatgccgtaatcacttatgctaatagatatgccaagatggccgaggaaatggctgaaaaagaaacagatgctgcaaggaggcaagaactattaacaatcgccagggtttgcaaaaacgttcctgaattcccagccgaaagcttccaggaggcctgccaatccttttggttcatacaacaagtgcttcaaattgaatccagtggtcattcaatttccccaggtagatttgatcaatatatgtatccttattacgaaaaggatttaaaggaaggtagcttaactagggaatatgctcaggaactgatcgattgtatctgggttaagttaaatgatctgaataagtgcagggatgctgcctctgctgagggctttgcaggatattccttatttcaaaacttaatcgttgggggccaaacggttcaaggaagggacgccaccaatgatttgagttttatgtgtatcacggcatctgaacacgtctttttaccgatgccgtcgttgtctataagagtttggcatggtagttccaaagcactgcttatgagagcagctgaattgactagaaccggtataggcttacctgcttattacaatgatgaagtcatcataccagctttggtgcataggggtgctactatggatgaagcaagaaattacaacataataggatgtgtcgaaccgcaggttcctggtaaaactgatggctggcacgatgcagcattctttaacatgtgcagacctttggaaatggtgtttagtaatggttatgataacggtgaaattgcatctatacaaactggtaacgtagaatcttttcagagttttgatgagtttatggaagcttacagaaaacaaatgctatataacatagaacttatggtaaatgccgacaacgcgatagattatgcccacgcaaagttggccccattgccatttgagtcatgtttggttgatgactgtataaagagaggaatgtccgctcaggaaggcggcgcaatctataatttcactggtccacagggctttggtattgcaaacgttgctgatagcttgtatacgattaagaaattggtgttcgaggagaagagaattacgatgggtgaattaaagaaagcgttggaaatgaattatggtaagggtttggatgccacaaccgctggtgacatcgcaatgcaggtcgcgaagggactaaaagatgccggacaggaagtgggtcccgacgtgatcgctaatacaatccgtcaagttcttgaaatggaattaccagaagatgtaagaaagagatatgaagagatccatgaaatgatacttgagttaccaaagtatggtaatgatatagatgaagttgatgaattagctagagaagcagcttacttttacacaagaccattagaaacttttaagaatccaaggggtggcatgtatcaagccggcctttatcccgtgtccgctaatgtgccactaggcgctcaaacgggggccacacccgatggacgtttggcgcatacacccgtggcggatggcgttggtccgacatcaggcttcgatatatccggaccaacagcttcttgcaattctgtcgccaagttggatcatgctatagcctctaatggtaccttatttaatatgaagatgcacccaaccgcaatggcaggtgaaaagggcttagaatccttcatatcgttgatccgtggttatttcgatcaacaaggtatgcacatgcaatttaacgtagtagacagggctacactgcttgatgcgcaggcccaccctgaaaagtattcaggcttaattgtcagagtggcaggttattctgccctttttaccacattgtccaagtcattacaagatgatataatcaaacgtaccgaacaagcagacaatagatag

SEQ ID NO: 16 - DNA, 794 bp, Roseburia inulinivorans
atgaaagaatatcttaatacttcaggtagaatatttgatatccagaggtattctattcacgatggccctggtgtgcgtacaattgtgtttctaaaaggttgtgcccttagatgcagatggtgctgtaatcctgaaagccaaagcttcgaagttgaaacaatgacgattaatggaaaacctaaagtcatgggtaaagatgttacagtcgccgaggttatgaagacggtagaaagagacatgccttattaccttcaatcaggtggtggtatcaccttatcgggtggcgaatgtactttgcaaccagaattttcccttggcctattgagagctgcaaaggatttgggcatatccacggcaatagagagcatggcgtacgcaaagtacgaagtaatagaaactcttcttccgtatttggatacgtatttaatggacatcaaacatatgaatcctgagaaacataaagaatacactggtcatgataacttgaggatgttagaaaacgccttaagagtcgcgcattctggtcagaccgaactgatcatcagagtacctgtcatcccaggattcaacgcaactgagcaggaactactagatattgcaaaattcgcagatacactgcctggagttagacaaatacacatcttgccatatcataattttggtcagggtaaatacgaaggattgaacagggactatccgatgggggacactgagaaaccctctaatgaacagatgaaagcttttcaagaaatgattcaaaagaacacttccctacattgccaaatcggtggtta

SEQ ID NO: 17 - DNA, 3378 bp, artificial sequence
  synthesized double coding region
ggatccgtttaaacaggagggccaaaatcatgggcaattacgattcaacaccgatagctaaaagtgataggattaaaagattggttgatcatttgtatgctaaaatgcctgaaattgaggccgctagagcagagctaattactgaatcctttaaggccaccgaaggtcaacctgttgttatgagaaaggctagagcttttgaacatatactaaagaatttgccaattatcataagaccagaagaactgattgttggctcaactacaattgcccctagaggttgccaaacgtatccagaattctcatacgagtggttagaggctgaatttgaaactgtcgaaacgcgttcagctgacccattttatatttcagaagaaacgaagaaacgtttgctggctgccgatgcttattggaaaggtaaaacaacctcagagttggcaacttcatatatggccccagaaactctaagagccatgaagcataacttcttcacccctggaaactacttctacaatggtgtcggtcatgtcacagttcaatatgaaacagtattagcaatcggcttgaatggagtaaaagagaaggttaggaaagagatggagaattgtcattttggtgatgccgattatagtacaaagatgtgtttcttggagagcattttaatatcgtgtgatgccgtaatcacttatgctaatagatatgccaagatggccgaggaaatggctgaaaaagaaacagatgctgcaaggaggcaagaactattaacaatcgccagggtttgcaaaaacgttcctgaattcccagccgaaagcttccaggaggcctgccaatccttttggttcatacaacaagtgcttcaaattgaatccagtggtcattcaatttccccaggtagatttgatcaatatatgtatccttattacgaaaaggatttaaaggaaggtagcttaactagggaatatgctcaggaactgatcgattgtatctgggttaagttaaatgatctgaataagtgcagggatgctgcctctgctgagggctttgcaggatattccttatttcaaaacttaatcgttgggggccaaacggttcaaggaagggacgccaccaatgatttgagttttatgtgtatcacggcatctgaacacgtctttttaccgatgccgtcgttgtctataagagtttggcatggtagttccaaagcactgcttatgagagcagctgaattgactagaaccggtataggcttacctgcttattacaatgatgaagtcatcataccagctttggtgcataggggtgctactatggatgaagcaagaaattacaacataataggatgtgtcgaaccgcaggttcctggtaaaactgatggctggcacgatgcagcattctttaacatgtgcagacctttggaaatggtgtttagtaatggttatgataacggtgaaattgcatctatacaaactggtaacgtagaatcttttcagagttttgatgagtttatggaagcttacagaaaacaaatgctatataacatagaacttatggtaaatgccgacaacgcgatagattatgcccacgcaaagttggccccattgccatttgagtcatgtttggttgatgactgtataaagagaggaatgtccgctcaggaaggcggcgcaatctataatttcactggtccacagggctttggtattgcaaacgttgctgatagcttgtatacgattaagaaattggtgttcgaggagaagagaattacgatgggtgaattaaagaaagcgttggaaatgaattatggtaagggtttggatgccacaaccgctggtgacatcgcaatgcaggtcgcgaagggactaaaagatgccggacaggaagtgggtcccgacgtgatcgctaatacaatccgtcaagttcttgaaatggaattaccagaagatgtaagaaagagatatgaagagatccatgaaatgatacttgagttaccaaagtatggtaatgatatagatgaagttgatgaattagctagagaagcagcttacttttacacaagaccattagaaacttttaagaatccaaggggtggcatgtatcaagccggcctttatcccgtgtccgctaatgtgccactaggcgctcaaacgggggccacacccgatggacgtttggcgcatacacccgtggcggatggcgttggtccgacatcaggcttcgatatatccggaccaacagcttcttgcaattctgtcgccaagttggatcatgctatagcctctaatggtaccttatttaatatgaagatgcacccaaccgcaatggcaggtgaaaagggcttagaatccttcatatcgttgatccgtggttatttcgatcaacaaggtatgcacatgcaatttaacgtagtagacagggctacactgcttgatgcgcaggcccaccctgaaaagtattcaggcttaattgtcagagtggcaggttattctgccctttttaccacattgtccaagtcattacaagatgatataatcaaacgtaccgaacaagcagacaatagataggaaggaaaaacgcgttatgaaagaatatcttaatacttcaggtagaatatttgatatccagaggtattctattcacgatggccctggtgtgcgtacaattgtgtttctaaaaggttgtgcccttagatgcagatggtgctgtaatcctgaaagccaaagcttcgaagttgaaacaatgacgattaatggaaaacctaaagtcatgggtaaagatgttacagtcgccgaggttatgaagacggtagaaagagacatgccttattaccttcaatcaggtggtggtatcaccttatcgggtggcgaatgtactttgcaaccagaattttcccttggcctattgagagctgcaaaggatttgggcatatccacggcaatagagagcatggcgtacgcaaagtacgaagtaatagaaactcttcttccgtatttggatacgtatttaatggacatcaaacatatgaatcctgagaaacataaagaatacactggtcatgataacttgaggatgttagaaaacgccttaagagtcgcgcattctggtcagaccgaactgatcatcagagtacctgtcatcccaggattcaacgcaactgagcaggaactactagatattgcaaaattcgcagatacactgcctggagttagacaaatacacatcttgccatatcataattttggtcagggtaaatacgaaggattgaacagggactatccgatgggggacactgagaaaccctctaatgaacagatgaaagcttttcaagaaatgattcaaaagaacacttccctacattgccaaatcggtggttaggtcgac

SEQ ID NO: 18 - DNA, 60 bp, artificial sequence
  primer
aaccaagtaatacatattcaaatctagagctgaggatgggcaattacgattcaacaccga

SEQ ID NO: 19 - DNA, 60 bp, artificial sequence
  primer
gtaagcgtgacataactaattacatgattaattaactatctattgtctgcttgttcggta

SEQ ID NO: 20 - DNA, 60 bp, artificial sequence
  primer
aatccaaacaaacacacatattacaatagctgaggatgaaagaatatcttaatacttcag

SEQ ID NO: 21 - DNA, 60 bp, artificial sequence
  primer
cataaatcataagaaattcgcttactcttaattaataaccaccgatttggcaatgtaggg

SEQ ID NO: 22 - DNA, 594 bp, artificial sequence
  synthetic double terminator fragment
taagagtaagcgaatttcttatgatttatgatttttattattaaataagttataaaaaaaataagtgtatacaaattttaaagtgactcttaggttttaaaacgaaaattcttattcttgagtaactctttcctgtaggtcaggttgctttctcaggtatagcatgaggtcgctcttattgaccacacctctaccggcatgccgagcaaatgcctgcaaatcgctccccatttcacccaattgtagatatgctaactccagcaatgagttgatgaatctcggtgtgtattttatgtcctcagaggacaacacctgtggtactagttctagagcggccgcccgcaaattaaagccttcgagcgtcccaaaaccttctcaagcaaggttttcagtataatgttacatgcgtacacgcgtctgtacagaaaaaaaagaaaaatttgaaatataaataacgttcttaatactaacataactataaaaaaataaatagggacctagacttcaggttgtctaactccttccttttcggttagagcggatgtggggggagggcgtgaatgtaagcgtgacataactaattacatgattaat

SEQ ID NO: 23 - DNA, 316 bp, Saccharomyces cerevisiae
gagtaagcgaatttcttatgatttatgatttttattattaaataagttataaaaaaaataagtgtatacaaattttaaagtgactcttaggttttaaaacgaaaattcttattcttgagtaactctttcctgtaggtcaggttgctttctcaggtatagcatgaggtcgctcttattgaccacacctctaccggcatgccgagcaaatgcctgcaaatcgctccccatttcacccaattgtagatatgctaactccagcaatgagttgatgaatctcggtgtgtattttatgtcctcagaggacaacacctgtggt

SEQ ID NO: 24 - DNA, 270 bp, Saccharomyces cerevisiae
gacctcgagtcatgtaattagttatgtcacgcttacattcacgccctccccccacatccgctctaaccgaaaaggaaggagttagacaacctgaagtctaggtccctatttatttttttatagttatgttagtattaagaacgttatttatatttcaaatttttcttttttttctgtacagacgcgtgtacgcatgtaacattatactgaaaaccttgcttgagaaggttttgggacgctcgaaggctttaatttgcggccggtacccaa

SEQ ID NO: 25 - DNA, 643 bp, Saccharomyces cerevisiae
gaaatgaataacaatactgacagtactaaataattgcctacttggcttcacatacgttgcatacgtcgatatagataataatgataatgacagcaggattatcgtaatacgtaatagttgaaaatctcaaaaatgtgtgggtcattacgtaaataatgataggaatgggattcttctatttttcctttttccattctagcagccgtcgggaaaacgtggcatcctctctttcgggctcaattggagtcacgctgccgtgagcatcctctctttccatatctaacaactgagcacgtaaccaatggaaaagcatgagcttagcgttgctccaaaaaagtattggatggttaataccatttgtctgttctcttctgactttgactcctcaaaaaaaaaaaatctacaatcaacagatcgcttcaattacgccctcacaaaaacttttttccttcttcttcgcccacgttaaattttatccctcatgttgtctaacggatttctgcacttgatttattataaaaagacaaagacataatacttctctatcaatttcagttattgttcttccttgcgttattcttctgttcttctttttcttttgtcatatataaccataaccaagtaatacatattcaaatctaga

SEQ ID NO: 26 - DNA, 753 bp, Saccharomyces cerevisiae
gcatgcttgcatttagtcgtgcaatgtatgactttaagatttgtgagcaggaagaaaagggagaatcttctaacgataaacccttgaaaaactgggtagactacgctatgttgagttgctacgcaggctgcacaattacacgagaatgctcccgcctaggatttaaggctaagggacgtgcaatgcagacgacagatctaaatgaccgtgtcggtgaagtgttcgccaaacttttcggttaacacatgcagtgatgcacgcgcgatggtgctaagttacatatatatatatatagccatagtgatgtctaagtaacctttatggtatatttcttaatgtggaaagatactagcgcgcgcacccacacacaagcttcgtcttttcttgaagaaaagaggaagctcgctaaatgggattccactttccgttccctgccagctgatggaaaaaggttagtggaacgatgaagaataaaaagagagatccactgaggtgaaatttcagctgacagcgagtttcatgatcgtgatgaacaatggtaacgagttgtggctgttgccagggagggtggttctcaacttttaatgtatggccaaatcgctacttgggtttgttatataacaaagaagaaataatgaactgattctcttcctccttcttgtcctttcttaattctgttgtaattaccttcctttgtaattttttttgtaattattcttcttaataatccaaacaaacacacatattacaata

SEQ ID NO: 27 - DNA, 1716 bp, Bacillus subtilis
atgttgacaaaagcaacaaaagaacaaaaatcccttgtgaaaaacagaggggcggagcttgttgttgattgcttagtggagcaaggtgtcacacatgtatttggcattccaggtgcaaaaattgatgcggtatttgacgctttacaagataaaggacctgaaattatcgttgcccggcacgaacaaaacgcagcattcatggcccaagcagtcggccgtttaactggaaaaccgggagtcgtgttagtcacatcaggaccgggtgcctctaacttggcaacaggcctgctgacagcgaacactgaaggagaccctgtcgttgcgcttgctggaaacgtgatccgtgcagatcgtttaaaacggacacatcaatctttggataatgcggcgctattccagccgattacaaaatacagtgtagaagttcaagatgtaaaaaatataccggaagctgttacaaatgcatttaggatagcgtcagcagggcaggctggggccgcttttgtgagctttccgcaagatgttgtgaatgaagtcacaaatacgaaaaacgtgcgtgctgttgcagcgccaaaactcggtcctgcagcagatgatgcaatcagtgcggccatagcaaaaatccaaacagcaaaacttcctgtcgttttggtcggcatgaaaggcggaagaccggaagcaattaaagcggttcgcaagcttttgaaaaaggttcagcttccatttgttgaaacatatcaagctgccggtaccctttctagagatttagaggatcaatattttggccgtatcggtttgttccgcaaccagcctggcgatttactgctagagcaggcagatgttgttctgacgatcggctatgacccgattgaatatgatccgaaattctggaatatcaatggagaccggacaattatccatttagacgagattatcgctgacattgatcatgcttaccagcctgatcttgaattgatcggtgacattccgtccacgatcaatcatatcgaacacgatgctgtgaaagtggaatttgcagagcgtgagcagaaaatcctttctgatttaaaacaatatatgcatgaaggtgagcaggtgcctgcagattggaaatcagacagagcgcaccctcttgaaatcgttaaagagttgcgtaatgcagtcgatgatcatgttacagtaacttgcgatatcggttcgcacgccatttggatgtcacgttatttccgcagctacgagccgttaacattaatgatcagtaacggtatgcaaacactcggcgttgcgcttccttgggcaatcggcgcttcattggtgaaaccgggagaaaaagtggtttctgtctctggtgacggcggtttcttattctcagcaatggaattagagacagcagttcgactaaaagcaccaattgtacacattgtatggaacgacagcacatatgacatggttgcattccagcaattgaaaaaatataaccgtacatctgcggtcgatttcggaaatatcgatatcgtgaaatatgcggaaagcttcggagcaactggcttgcgcgtagaatcaccagaccagctggcagatgttctgcgtcaaggcatgaacgctgaaggtcctgtcatcatcgatgtcccggttgactacagtgataacattaatttagcaagtgacaagcttccgaaagaattcggggaactcatgaaaacgaaagctctctag

SEQ ID NO: 28 - protein, 255 aa, Bacillus subtilis
MKRESNIQVLSRGQKDQPVSQIYQVSTMTSLLDGVYDGDFELSEIPKYGDFGIGTFNKLDGELIGFDGEFYRLRSDGTATPVQNGDRSPFCSFTFFTPDMTHKIDAKMTREDFEKEINSMLPSRNLFYAIRIDGLFKKVQTRTVELQEKPYVPMVEAVKTQPIFNFDNVRGTIVGFLTPAYANGIAVSGYHLHFIDEGRNSGGHVFDYVLEDCTVTISQKMNMNLRLPNTADFFNANLDNPDFAKDIETTEGSPE

SEQ ID NO: 29 - DNA, 8946 bp, artificial sequence
  vector
tcgcgcgtttcggtgatgacggtgaaaacctctgacacatgcagctcccggagacggtcacagcttgtctgtaagcggatgccgggagcagacaagcccgtcagggcgcgtcagcgggtgttggcgggtgtcggggctggcttaactatgcggcatcagagcagattgtactgagagtgcaccataaattcccgttttaagagcttggtgagcgctaggagtcactgccaggtatcgtttgaacacggcattagtcagggaagtcataacacagtcctttcccgcaattttctttttctattactcttggcctcctctagtacactctatatttttttatgcctcggtaatgattttcatttttttttttcccctagcggatgactctttttttttcttagcgattggcattatcacataatgaattatacattatataaagtaatgtgatttcttcgaagaatatactaaaaaatgagcaggcaagataaacgaaggcaaagatgacagagcagaaagccctagtaaagcgtattacaaatgaaaccaagattcagattgcgatctctttaaagggtggtcccctagcgatagagcactcgatcttcccagaaaaagaggcagaagcagtagcagaacaggccacacaatcgcaagtgattaacgtccacacaggtatagggtttctggaccatatgatacatgctctggccaagcattccggctggtcgctaatcgttgagtgcattggtgacttacacatagacgaccatcacaccactgaagactgcgggattgctctcggtcaagcttttaaagaggccctactggcgcgtggagtaaaaaggtttggatcaggatttgcgcctttggatgaggcactttccagagcggtggtagatctttcgaacaggccgtacgcagttgtcgaacttggtttgcaaagggagaaagtaggagatctctcttgcgagatgatcccgcattttcttgaaagctttgcagaggctagcagaattaccctccacgttgattgtctgcgaggcaagaatgatcatcaccgtagtgagagtgcgttcaaggctcttgcggttgccataagagaagccacctcgcccaatggtaccaacgatgttccctccaccaaaggtgttcttatgtagtgacaccgattatttaaagctgcagcatacgatatatatacatgtgtatatatgtatacctatgaatgtcagtaagtatgtatacgaacagtatgatactgaagatgacaaggtaatgcatcattctatacgtgtcattctgaacgaggcgcgctttccttttttctttttgctttttctttttttttctcttgaactcgacggatctatgcggtgtgaaataccgcacagatgcgtaaggagaaaataccgcatcaggaaattgtaaacgttaatattttgttaaaattcgcgttaaatttttgttaaatcagctcattttttaaccaataggccgaaatcggcaaaatcccttataaatcaaaagaatagaccgagatagggttgagtgttgttccagtttggaacaagagtccactattaaagaacgtggactccaacgtcaaagggcgaaaaaccgtctatcagggcgatggcccactacgtgaaccatcaccctaatcaagttttttggggtcgaggtgccgtaaagcactaaatcggaaccctaaagggagcccccgatttagagcttgacggggaaagccggcgaacgtggcgagaaaggaagggaagaaagcgaaaggagcgggcgctagggcgctggcaagtgtagcggtcacgctgcgcgtaaccaccacacccgccgcgcttaatgcgccgctacagggcgcgtcgcgccattcgccattcaggctgcgcaactgttgggaagggcgatcggtgcgggcctcttcgctattacgccagctggcgaaagggggatgtgctgcaaggcgattaagttgggtaacgccagggttttcccagtcacgacgttgtaaaacgacggccagtgagcgcgcgtaatacgactcactatagggcgaattgggtaccgggccccccctcgaggtcgacggcgcgccactggtagagagcgactttgtatgccccaattgcgaaacccgcgatatccttctcgattctttagtacccgaccaggacaaggaaaaggaggtcgaaacgtttttgaagaaacaagaggaactacacggaagctctaaagatggcaaccagccagaaactaagaaaatgaagttgatggatccaactggcaccgctggcttgaacaacaataccagccttccaacttctgtaaataacggcggtacgccagtgccaccagtaccgttacctttcggtatacctcctttccccatgtttccaatgcccttcatgcctccaacggctactatcacaaatcctcatcaagctgacgcaagccctaagaaatgaataacaatactgacagtactaaataattgcctacttggcttcacatacgttgcatacgtcgatatagataataatgataatgacagcaggattatcgtaatacgtaatagttgaaaatctcaaaaatgtgtgggtcattacgtaaataatgataggaatgggattcttctatttttcctttttccattctagcagccgtcgggaaaacgtggcatcctctctttcgggctcaattggagtcacgctgccgtgagcatcctctctttccatatctaacaactgagcacgtaaccaatggaaaagcatgagcttagcgttgctccaaaaaagtattggatggttaataccatttgtctgttctcttctgactttgactcctcaaaaaaaaaaaatctacaatcaacagatcgcttcaattacgccctcacaaaaacttttttccttcttcttcgcccacgttaaattttatccctcatgttgtctaacggatttctgcacttgatttattataaaaagacaaagacataatacttctctatcaatttcagttattgttcttccttgcgttattcttctgttcttctttttcttttgtcatatataaccataaccaagtaatacatattcagcatgctagtgaaggccaagttcgtcaagggctttattagagatgttcatccgtatgggtgtaggagagaagtgttaaaccagattgactactgcaagaaagcaattggctttaggggccctaaaaaggttcttattgtaggtgcttcttcaggcttcggactagctactagaatatctgttgcattcggagggcctgaagcccatacaatcggtgtttcatacgagactggagctacagacagaaggataggtacggctgggtggtacaataatatcttctttaaagaattcgctaagaagaaaggtttggtggcaaagaatttcatagaagatgcattttcgaatgaaaccaaggataaagtgataaagtatataaaggacgaatttggtaaaattgatttattcgtatattctttagctgctcctagaagaaaggactacaaaaccggtaatgtttatacctcaagaattaaaacaattctaggtgactttgaagggcctactattgacgtagaaagagatgaaataactttaaagaaggtatcttctgctagtatcgaggaaatcgaagaaacacgtaaagtaatgggcggagaagactggcaggagtggtgtgaggagttattatacgaagattgtttttctgataaagctacaaccatcgcttattcctatattggcagtcctagaacttataaaatatatcgtgaaggaaccattgggattgctaagaaggatttagaagacaaagccaagttgatcaacgaaaagcttaatagagtcataggaggtagggcatttgtgtctgttaacaaagctttagtaaccaaggcatctgcttatattccaaccttccctctatacgctgccatattatataaagtaatgaaagaaaagaacattcacgaaaattgtattatgcaaattgagcgtatgttctcagagaaaatatactccaacgaaaagattcagttcgatgataagggccgtcttagaatggacgatttagaactaagaaaggatgttcaggatgaagttgacagaatttggtctaacataacaccagaaaacttcaaggagcttagtgactacaaggggtataagaaagagtttatgaatctaaatggttttgatttagatggagttgattattccaaggatcttgatattgaattacttagaaaactagagccttaagcggccgcgttaattcaaattaattgatatagttttttaatgagtattgaatctgtttagaaataatggaatattatttttatttatttatttatattattggtcggctcttttcttctgaaggtcaatgacaaaatgatatgaaggaaataatgatttctaaaattttacaacgtaagatatttttacaaaagcctagctcatcttttgtcatgcactattttactcacgcttgaaattaacggccagtccactgcggagtcatttcaaagtcatcctaatcgatctatcgtttttgatagctcattttggagttcgcgattgtcttctgttattcacaactgttttaatttttatttcattctggaactcttcgagttctttgtaaagtctttcatagtagcttactttatcctccaacatatttaacttcatgtcaatttcggctcttaaattttccacatcatcaagttcaacatcatcttttaacttgaatttattctctagctcttccaaccaagcctcattgctccttgatttactggtgaaaagtgatacactttgcgcgcaatccaggtcaaaactttcctgcaaagaattcaccaatttctcgacatcatagtacaatttgttttgttctcccatcacaatttaatatacctgatggattcttatgaagcgctgggtaatggacgtgtcactctacttcgcctttttccctactccttttagtacggaagacaatgctaataaataagagggtaataataatattattaatcggcaaaaaagattaaacgccaagcgtttaattatcagaaagcaaacgtcgtaccaatccttgaatgcttcccaattgtatattaagagtcatcacagcaacatattcttgttattaaattaattattattgatttttgatattgtataaaaaaaccaaatatgtataaaaaaagtgaataaaaaataccaagtatggagaaatatattagaagtctatacgttaaaccaccgcggtggagctccagcttttgttccctttagtgagggttaattgcgcgcttggcgtaatcatggtcatagctgtttcctgtgtgaaattgttatccgctcacaattccacacaacataggagccggaagcataaagtgtaaagcctggggtgcctaatgagtgaggtaactcacattaattgcgttgcgctcactgcccgctttccagtcgggaaacctgtcgtgccagctgcattaatgaatcggccaacgcgcggggagaggcggtttgcgtattgggcgctcttccgcttcctcgctcactgactcgctgcgctcggtcgttcggctgcggcgagcggtatcagctcactcaaaggcggtaatacggttatccacagaatcaggggataacgcaggaaagaacatgtgagcaaaaggccagcaaaaggccaggaaccgtaaaaaggccgcgttgctggcgtttttccataggctccgcccccctgacgagcatcacaaaaatcgacgctcaagtcagaggtggcgaaacccgacaggactataaagataccaggcgtttccccctggaagctccctcgtgcgctctcctgttccgaccctgccgcttaccggatacctgtccgcctttctcccttcgggaagcgtggcgctttctcatagctcacgctgtaggtatctcagttcggtgtaggtcgttcgctccaagctgggctgtgtgcacgaaccccccgttcagcccgaccgctgcgccttatccggtaactatcgtcttgagtccaacccggtaagacacgacttatcgccactggcagcagccactggtaacaggattagcagagcgaggtatgtaggcggtgctacagagttcttgaagtggtggcctaactacggctacactagaaggacagtatttggtatctgcgctctgctgaagccagttaccttcggaaaaagagttggtagctcttgatccggcaaacaaaccaccgctggtagcggtggtttttttgtttgcaagcagcagattacgcgcagaaaaaaaggatctcaagaagatcctttgatcttttctacggggtctgacgctcagtggaacgaaaactcacgttaagggattttggtcatgagattatcaaaaaggatcttcacctagatccttttaaattaaaaatgaagttttaaatcaatctaaagtatatatgagtaaacttggtctgacagttaccaatgcttaatcagtgaggcacctatctcagcgatctgtctatttcgttcatccatagttgcctgactccccgtcgtgtagataactacgatacgggagggcttaccatctggccccagtgctgcaatgataccgcgagacccacgctcaccggctccagatttatcagcaataaaccagccagccggaagggccgagcgcagaagtggtcctgcaactttatccgcctccatccagtctattaattgttgccgggaagctagagtaagtagttcgccagttaatagtttgcgcaacgttgttgccattgctacaggcatcgtggtgtcacgctcgtcgtttggtatggcttcattcagctccggttcccaacgatcaaggcgagttacatgatcccccatgttgtgcaaaaaagcggttagctccttcggtcctccgatcgttgtcagaagtaagttggccgcagtgttatcactcatggttatggcagcactgcataattctcttactgtcatgccatccgtaagatgcttttctgtgactggtgagtactcaaccaagtcattctgagaatagtgtatgcggcgaccgagttgctcttgcccggcgtcaatacgggataataccgcgccacatagcagaactttaaaagtgctcatcattggaaaacgttcttcggggcgaaaactctcaaggatcttaccgctgttgagatccagttcgatgtaacccactcgtgcacccaactgatcttcagcatcttttactttcaccagcgtttctgggtgagcaaaaacaggaaggcaaaatgccgcaaaaaagggaataagggcgacacggaaatgttgaatactcatactcttcctttttcaatattattgaagcatttatcagggttattgtctcatgagcggatacatatttgaatgtatttagaaaaataaacaaataggggttccgcgcacatttccccgaaaagtgccacctgaacgaagcatctgtgcttcattttgtagaacaaaaatgcaacgcgagagcgctaatttttcaaacaaagaatctgagctgcatttttacagaacagaaatgcaacgcgaaagcgctattttaccaacgaagaatctgtgcttcatttttgtaaaacaaaaatgcaacgcgagagcgctaatttttcaaacaaagaatctgagctgcatttttacagaacagaaatgcaacgcgagagcgctattttaccaacaaagaatctatacttcttttttgttctacaaaaatgcatcccgagagcgctatttttctaacaaagcatcttagattactttttttctcctttgtgcgctctataatgcagtctcttgataactttttgcactgtaggtccgttaaggttagaagaaggctactttggtgtctattttctcttccataaaaaaagcctgactccacttcccgcgtttactgattactagcgaagctgcgggtgcattttttcaagataaaggcatccccgattatattctataccgatgtggattgcgcatactttgtgaacagaaagtgatagcgttgatgattcttcattggtcagaaaattatgaacggtttcttctattttgtctctatatactacgtataggaaatgtttacattttcgtattgttttcgattcactctatgaatagttcttactacaatttttttgtctaaagagtaatactagagataaacataaaaaatgtagaggtcgagtttagatgcaagttcaaggagcgaaaggtggatgggtaggttatatagggatatagcacagagatatatagcaaagagatacttttgagcaatgtttgtggaagcggtattcgcaatattttagtagctcgttacagtccggtgcgtttttggttttttgaaagtgcgtcttcagagcgcttttggttttcaaaagcgctctgaagttcctatactttctagagaataggaacttcggaataggaacttcaaagcgtttccgaaaacgagcgcttccgaaaatgcaacgcgagctgcgcacatacagctcactgttcacgtcgcacctatatctgcgtgttgcctgtatatatatatacatgagaagaacggcatagtgcgtgtttatgcttaaatgcgtacttatatgcgtctatttatgtaggatgaaaggtagtctagtacctcctgtgatattatcccattccatgcggggtatcgtatgcttccttcagcactaccctttagctgttctatatgctgccactcctcaattggattagtctcatccttcaatgctatcatttcctttgatattggatcatctaagaaaccattattatcatgacattaacctataaaaataggcgtatcacgaggccctttcgtc

SEQ ID NO: 30 - DNA, 76 bp, artificial sequence
  primer
agtcacatagttaaatggcgctgttcttcgctgcgagcggaaccgggcctggggcgcgtcagcgggtgttggcggg

SEQ ID NO: 31 - DNA, 68 bp, artificial sequence
  primer
ctgatcgttgtttttttttaaataaatgtttatccattctccttacgcatctgtgcggtatttcacac

SEQ ID NO: 32 - DNA, 22 bp, artificial sequence
  primer
gttcttattccctcttgtatcc

SEQ ID NO: 33 - DNA, 20 bp, artificial sequence
  primer
cttggcagcaacaggactag

SEQ ID NO: 34 - DNA, 448 bp, Saccharomyces serevisiae
cccattaccgacatttgggcgctatacgtgcatatgttcatgtatgtatctgtatttaaaacacttttgtattatttttcctcatatatgtgtataggtttatacggatgatttaattattacttcaccaccctttatttcaggctgatatcttagccttgttactagttagaaaaagacatttttgctgtcagtcactgtcaagagattcttttgctggcatttcttctagaagcaaaaagagcgatgcgtcttttccgctgaaccgttccagcaaaaaagactaccaacgcaatatggattgtcagaatcatataaaagagaagcaaataactccttgtcttgtatcaattgcattataatatcttcttgttagtgcaatatcatatagaagtcatcgaaatagatattaagaaaaacaaactgtacaatcaatcaatcaatcatc

SEQ ID NO: 35 - DNA, 1485 bp, Vibrio cholerae
atggcgaattatttcaatacgctgaatctgcgtgaacagttggatcaacttggtcgttgccgttttatggcgcgagaagagtttgcaaccgaagctgattacctaaaaggtaagaaagtggtgatcgtaggttgtggggctcaaggcctaaaccaaggcctcaatatgcgtgattcaggtttggatgtttcttacgctctgcgtcaggctgcgattgatgaacagcgtcagtcatttaagaatgccaagaataatggcttcaacgtgggtagttatgaacaactcatcccaaccgcagatttggtgattaacttgacgccagacaagcagcacaccagtgtggtcaatgcggtgatgcctctgatgaagcaaggtgctgccttgggttactcacacggttttaatatcgttgaagagggcatgcagatccgtaaagacatcacggttgtgatggtggcaccaaaatgtccgggtacggaagttcgtgaagagtataagcgcggtttcggcgttcctactcttatcgcggtacaccctgaaaacgatccacaaggtgaaggttgggaaattgctaaagcgtgggctgcggcaacgggtggccatcgtgcgggctgtttagcttcttcttttgtggcggaagtgaaatccgatttgatgggtgagcaaaccattctctgcggtatgctgcaagcgggctctatcgtttgttacgagaaaatggttgctgatggcatcgaccctggttatgcgggcaagcttttgcaatttggttgggaaaccattaccgaagcactcaagtttggcggtattactcatatgatggatcgcctgtctaaccctgcaaaaatcaaagcgtttgagctgtctgaagagttgaaagatctgatgcgcccactgtacaacaagcatatggatgacatcatttctggccacttctctagcaccatgatggcggattgggcgaatgatgataaagacttattcggctggcgtgcagaaaccgctgagacgacctttgaaaactatccaacaaccgacgtaaaaattgctgagcaagaatactttgataacggtattttgatgattgccatggtgcgtgctggggttgagttggcgtttgaagcgatgacggcttcaggcatcatcgatgagtcggcttactatgaatcactgcacgaactcccactgattgccaatacggtagcgcgtaagcgtctgtatgaaatgaacgtggtaatctctgacactgctgagtacggtaactatctgtttgccaatgtggcggtaccactattgcgtgaaaagtttatgccgaaagtgggcactgatgtgattggtaaaggattaggcgtggtctctaatcaagttgataacgcaacgcttatcgaagtaaacagcatcatccgtaaccatccggttgagtatatcggtgaagagctacgcggttacatgaaagacatgaagcgcatcgccgtgggtgattaa

SEQ ID NO: 36 - protein, 494 aa, Vibrio cholerae
MANYFNTLNLREQLDQLGRCRFMAREEFATEADYLKGKKVVIVGCGAQGLNQGLNMRDSGLDVSYALRQAAIDEQRQSFKNAKNNGFNVGSYEQLIPTADLVINLTPDKQHTSVVNAVMPLMKQGAALGYSHGFNIVEEGMQIRKDITVVMVAPKCPGTEVREEYKRGFGVPTLIAVHPENDPQGEGWEIAKAWAAATGGHRAGCLASSFVAEVKSDLMGEQTILCGMLQAGSIVCYEKMVADGIDPGYAGKLLQFGWETITEALKFGGITHMMDRLSNPAKIKAFELSEELKDLMRPLYNKHMDDIISGHFSSTMMADWANDDKDLFGWRAETAETTFENYPTTDVKIAEQEYFDNGILMIAMVRAGVELAFEAMTASGIIDESAYYESLHELPLIANTVARKRLYEMNVVISDTAEYGNYLFANVAVPLLREKFMPKVGTDVIGKGLGVVSNQVDNATLIEVNSIIRNHPVEYIGEELRGYMKDMKRIAVGD

SEQ ID NO: 37 - DNA, 1014 bp, Pseudomonas aeruginosa
atgcgcgttttctacgataaagactgtgacctctcgatcatccagggcaagaaagttgccatcatcggctacggctcccagggccacgcccatgcctgcaacctgaaggactccggcgtcgacgtcaccgtgggcctgcgtagcggctccgccaccgtggccaaggccgaagcgcacggtctgaaggttgccgacgtgaagaccgccgtcgccgcagccgacgtggtcatgatcctcaccccggacgagttccagggccgcctgtacaaggaagagatcgagccgaacctgaagaagggcgccaccctggccttcgctcacggcttctccatccactacaaccaggtcgtcccgcgcgccgacctcgacgtgatcatgatcgcgccgaaggcaccgggtcacaccgtgcgttccgagttcgtcaagggcggtggcatccctgacctgatcgccatctaccaggacgcttccggcaacgccaagaacgtcgccctgtcctacgcctgcggcgtcggcggcggtcgtaccggtatcatcgaaaccaccttcaaggacgagaccgaaaccgacctgttcggtgagcaggccgttctctgcggtggttgcgtcgagctggtcaaggccggtttcgaaaccctggtcgaagccggttacgcgccggaaatggcctacttcgagtgcctgcacgagctgaagctgatcgtcgacctgatgtacgaaggcggcatcgccaacatgaactactccatctccaacaatgccgaatacggtgagtacgtaaccggtccggaggtgatcaacgccgagtcccgtgctgccatgcgcaacgccctgaagcgcatccaggacggcgagtacgcgaaaatgttcattaccgaaggtgcggccaactacccgtcgatgactgcctaccgccgcaacaacgccgctcacccgatcgagcagatcggcgagaagctgcgcgcgatgatgccgtggatcgcagccaacaagatcgtcgacaagagcaagaac

SEQ ID NO: 38 - protein, 338 aa, Pseudomonas aeruginosa
MRVFYDKDCDLSIIQGKKVAIIGYGSQGHAHACNLKDSGVDVTVGLRSGSATVAKAEAHGLKVADVKTAVAAADVVMILTPDEFQGRLYKEEIEPNLKKGATLAFAHGFSIHYNQVVPRADLDVIMIAPKAPGHTVRSEFVKGGGIPDLIAIYQDASGNAKNVALSYACGVGGGRTGIIETTFKDETETDLFGEQAVLCGGCVELVKAGFETLVEAGYAPEMAYFECLHELKLIVDLMYEGGIANMNYSISNNAEYGEYVTGPEVINAESRAAMRNALKRIQDGEYAKMFITEGAANYPSMTAYRRNNAAHPIEQIGEKLRAMMPWIAANKIVDKSKN

SEQ ID NO: 39 - DNA, 1014 bp, Pseudomonas fluorescens
atgaaagttttctacgataaagactgcgacctgtcgatcatccaaggtaagaaagttgccatcatcggctacggttcccagggccacgctcaagcatgcaacctgaaggattccggcgtagacgtgactgttggcctgcgtaaaggctcggctaccgttgccaaggctgaagcccacggcttgaaagtgaccgacgttgctgcagccgttgccggtgccgacttggtcatgatcctgaccccggacgagttccagtcccagctgtacaagaacgaaatcgagccgaacatcaagaagggcgccactctggccttctcccacggcttcgcgatccactacaaccaggttgtgcctcgtgccgacctcgacgtgatcatgatcgcgccgaaggctccaggccacaccgtacgttccgagttcgtcaagggcggtggtattcctgacctgatcgcgatctaccaggacgcttccggcaacgccaagaacgttgccctgtcctacgccgcaggcgtgggcggcggccgtaccggcatcatcgaaaccaccttcaaggacgagactgaaaccgacctgttcggtgagcaggctgttctgtgtggcggtaccgtcgagctggtcaaagccggtttcgaaaccctggttgaagctggctacgctccagaaatggcctacttcgagtgcctgcacgaactgaagctgatcgttgacctcatgtacgaaggcggtatcgccaacatgaactactcgatctccaacaacgctgaatacggcgagtacgtgactggtccagaagtcatcaacgccgaatcccgtcaggccatgcgcaatgctctgaagcgcatccaggacggcgaatacgcgaagatgttcatcagcgaaggcgctaccggctacccatcgatgaccgccaagcgtcgtaacaacgctgctcacggtatcgaaatcatcggcgagcaactgcgctcgatgatgccttggatcggtgccaacaaaatcgtcgacaaagccaagaac

SEQ ID NO: 40 - protein, 338 aa, Pseudomonas fluorescens
MKVFYDKDCDLSIIQGKKVAIIGYGSQGHAQACNLKDSGVDVTVGLRKGSATVAKAEAHGLKVTDVAAAVAGADLVMILTPDEFQSQLYKNEIEPNIKKGATLAFSHGFAIHYNQVVPRADLDVIMIAPKAPGHTVRSEFVKGGGIPDLIAIYQDASGNAKNVALSYAAGVGGGRTGIIETTFKDETETDLFGEQAVLCGGTVELVKAGFETLVEAGYAPEMAYFECLHELKLIVDLMYEGGIANMNYSISNNAEYGEYVTGPEVINAESRQAMRNALKRIQDGEYAKMFISEGATGYPSMTAKRRNNAAHGIEIIGEQLRSMMPWIGANKIVDKAKN

SEQ ID NO: 41 - DNA, 1047 bp, Achromobacter xylosoxidans
atgaaagctctggtttatcacggtgaccacaagatctcgcttgaagacaagcccaagcccacccttcaaaagcccacggatgtagtagtacgggttttgaagaccacgatctgcggcacggatctcggcatctacaaaggcaagaatccagaggtcgccgacgggcgcatcctgggccatgaaggggtaggcgtcatcgaggaagtgggcgagagtgtcacgcagttcaagaaaggcgacaaggtcctgatttcctgcgtcacttcttgcggctcgtgcgactactgcaagaagcagctttactcccattgccgcgacggcgggtggatcctgggttacatgatcgatggcgtgcaggccgaatacgtccgcatcccgcatgccgacaacagcctctacaagatcccccagacaattgacgacgaaatcgccgtcctgctgagcgacatcctgcccaccggccacgaaatcggcgtccagtatgggaatgtccagccgggcgatgcggtggctattgtcggcgcgggccccgtcggcatgtccgtactgttgaccgcccagttctactccccctcgaccatcatcgtgatcgacatggacgagaatcgcctccagctcgccaaggagctcggggcaacgcacaccatcaactccggcacggagaacgttgtcgaagccgtgcataggattgcggcagagggagtcgatgttgcgatcgaggcggtgggcataccggcgacttgggacatctgccaggagatcgtcaagcccggcgcgcacatcgccaacgtcggcgtgcatggcgtcaaggttgacttcgagattcagaagctctggatcaagaacctgacgatcaccacgggactggtgaacacgaacacgacgcccatgctgatgaaggtcgcctcgaccgacaagcttccgttgaagaagatgattacccatcgcttcgagctggccgagatcgagcacgcctatcaggtattcctcaatggcgccaaggagaaggcgatgaagatcatcctctcgaacgcaggcgctgcctga

SEQ ID NO: 42 - protein, 348 aa, Achromobacter xylosoxidans
MKALVYHGDHKISLEDKPKPTLQKPTDVVVRVLKTTICGTDLGIYKGKNPEVADGRILGHEGVGVIEEVGESVTQFKKGDKVLISCVTSCGSCDYCKKQLYSHCRDGGWILGYMIDGVQAEYVRIPHADNSLYKIPQTIDDEIAVLLSDILPTGHEIGVQYGNVQPGDAVAIVGAGPVGMSVLLTAQFYSPSTIIVIDMDENRLQLAKELGATHTINSGTENVVEAVHRIAAEGVDVAIEAVGIPATWDICQEIVKPGAHIANVGVHGVKVDFEIQKLWIKNLTITTGLVNTNTTPMLMKVASTDKLPLKKMITHRFELAEIEHAYQVFLNGAKEKAMKIILSNAGAA

SEQ ID NO: 43 - protein, 843 aa, Roseburia inulinivorans
MGNYDSTPIAKSDRIKRLVDHLYAKMPEIEAARAELITESFKATEGQPVVMRKARAFEHILKNLPIIIRPEELIVGSTTIAPRGCQTYPEFSYEWLEAEFETVETRSADPFYISEETKKRLLAADAYWKGKTTSELATSYMAPETLRAMKHNFFTPGNYFYNGVGHVTVQYETVLAIGLNGVKEKVRKEMENCHFGDADYSTKMCFLESILISCDAVITYANRYAKMAEEMAEKETDAARRQELLTIARVCKNVPEFPAESFQEACQSFWFIQQVLQIESSGHSISPGRFDQYMYPYYEKDLKEGSLTREYAQELIDCIWVKLNDLNKCRDAASAEGFAGYSLFQNLIVGGQTVQGRDATNDLSFMCITASEHVFLPMPSLSIRVWHGSSKALLMRAAELTRTGIGLPAYYNDEVIIPALVHRGATMDEARNYNIIGCVEPQVPGKTDGWHDAAFFNMCRPLEMVFSNGYDNGEIASIQTGNVESFQSFDEFMEAYRKQMLYNIELMVNADNAIDYAHAKLAPLPFESCLVDDCIKRGMSAQEGGAIYNFTGPQGFGIANVADSLYTIKKLVFEEKRITMGELKKALEMNYGKGLDATTAGDIAMQVAKGLKDAGQEVGPDVIANTIRQVLEMELPEDVRKRYEEIHEMILELPKYGNDIDEVDELAREAAYFYTRPLETFKNPRGGMYQAGLYPVSANVPLGAQTGATPDGRLAHTPVADGVGPTSGFDISGPTASCNSVAKLDHAIASNGTLFNMKMHPTAMAGEKGLESFISLIRGYFDQQGMHMQFNVVDRATLLDAQAHPEKYSGLIVRVAGYSALFTTLSKSLQDDIIKRTEQADNR

SEQ ID NO: 44 - protein, 264 aa, Roseburia inulinivorans
MKEYLNTSGRIFDIQRYSIHDGPGVRTIVFLKGCALRCRWCCNPESQSFEVETMTINGKPKVMGKDVTVAEVMKTVERDMPYYLQSGGGITLSGGECTLQPEFSLGLLRAAKDLGISTAIESMAYAKYEVIETLLPYLDTYLMDIKHMNPEKHKEYTGHDNLRMLENALRVAHSGQTELIIRVPVIPGFNATEQELLDIAKFADTLPGVRQIHILPYHNFGQGKYEGLNRDYPMGDTEKPSNEQMKAFQEMIQKNTSLHCQIGG

SEQ ID NO: 45 - DNA, 1815 bp, Chlamydomonas reinhardtii
atgtcgtcgactgcgaccatgcccggccagcgctcggccatgaaggccgctggcgcccagagccgccgtgccgtgaaggtgatggccgtgtccgctccggagaagccgtcgtcgtccgccccggccgtcccggcaggcctgaacaagttcagcagccgcatcacgcaacccaagtaccagggcgcgtctcaggccatgctgttcgctaccggtctgcgggaggaggacatgatcaagccgcaggtgggcatctcctcggtgtggtacgagggcaacccttgcaacatgcacctgatggacctggcggcggaggtgaagaagggcgtggaggccatgggcatggtgggcttccgcttcaacaccattggtgtcagcgacggcatttccatgggcaccgacggcatgagcttcagcctgcagagccgcgacctgattgccgactccattgagacggtcatgagcgcgcagtggtacgacgccaacatctcgctgcccggctgcgacaagaacatgcccggcacgctgatggccatggcccgcctgaaccgcccctcgctcatgatctacggcggcactatcaagcccggccacagccgcatggacggctccgtgctggacatcgtgtccgccttccagagctacggcgcctactcggccggcctgatcaacgaggcccagcgtgtggacattgtgcgcaacagctgccctggcgctggcgcgtgcggcggcatgtacactgccaacaccatggcctcggccattgaggctctgggcatgaccctgccctacagctcgtccatccccgctgaggacccgctgaagaaggacgagtgccgcatggccggccgctacatgctggagctgctcaagtccgacctgaagcctctggacatcatgacctacaaggcctttgagaacgccatggtgctggtcatggccaccggcggctccaccaacgccgtgctgcacttcatcgccatggcgcgcgcctgcggcgtgcccctgaccctggacgacttccagcgcgtgtctgaccgcacgcccttcatctgcgacctcaagccctcgggccgctacgtcatggaggacatccacaaggtgggcggcacccccgccgtgctgaagtacctggactccaagggctacatcaaccgcgactgcatgaccgtcactggcaagaccatgggcggcaacctggcggaggtgccggagctgcgtgcgggccaggacgtggtgctgcccgtggagaagcccatcaagcagactggccacatccagatcctgtacggcaacctggccccggagggcagcgtggccaagatcactggcaaggagggcctgctgttcgagggcgaggcgctggtgtttgacaacgaggaggacatgatcaccatggtgggcgccgagcccaacaagttccgcggcaaggtggtggtgatccgctacgagggccccaagggcggccccggcatgcccgagatgctcacgcccacctccgccatcatgggcgccggcctgggcaaggagtgcgcgctcatcaccgacggacgcttcagcggcggcagccacggcttcgtgatcggccacgtcacgcccgaggcgcaggtcggcggccccatcgccctggtcaagaacggcgacaagattgtgattgatgtggagaagcgcgtgatggacatgaagatctccgaccaggagctggccgcgcgcaaggctgcctggaaggcgcccccgctgaaggccaccagcggcaccctgtacaagtacatcaagaacgtgtcgtcggcgtccactggctgcgtcaccgactcgtaa

SEQ ID NO: 46 - protein, 604 aa, Chlamydomonas reinhardtii
MSSTATMPGQRSAMKAAGAQSRRAVKVMAVSAPEKPSSSAPAVPAGLNKFSSRITQPKYQGASQAMLFATGLREEDMIKPQVGISSVWYEGNPCNMHLMDLAAEVKKGVEAMGMVGFRFNTIGVSDGISMGTDGMSFSLQSRDLIADSIETVMSAQWYDANISLPGCDKNMPGTLMAMARLNRPSLMIYGGTIKPGHSRMDGSVLDIVSAFQSYGAYSAGLINEAQRVDIVRNSCPGAGACGGMYTANTMASAIEALGMTLPYSSSIPAEDPLKKDECRMAGRYMLELLKSDLKPLDIMTYKAFENAMVLVMATGGSTNAVLHFIAMARACGVPLTLDDFQRVSDRTPFICDLKPSGRYVMEDIHKVGGTPAVLKYLDSKGYINRDCMTVTGKTMGGNLAEVPELRAGQDVVLPVEKPIKQTGHIQILYGNLAPEGSVAKITGKEGLLFEGEALVFDNEEDMITMVGAEPNKFRGKVVVIRYEGPKGGPGMPEMLTPTSAIMGAGLGKECALITDGRFSGGSHGFVIGHVTPEAQVGGPIALVKNGDKIVIDVEKRVMDMKISDQELAARKAAWKAPPLKATSGTLYKYIKNVSSASTGCVTDS

SEQ ID NO: 47 - DNA, 1704 bp, Ostreococcus lucimarinus
atgcccgacggcgacgcgagcgatttgaacaagtggtcgagaaagatcacgcaaccgaagagccaaggagcgtcgcaggcgatgctgtacgccacgggcctgacggaggccgatatgaacaaaccgcagatcggcgtgtcctcggtgtggtggcagggaaacccttgtaacaaacacttgctggacctggcgggtaaagtggcggaaggcgtcaaggcggcggatatggtgagctttcagtttaacaccgtgggggtgtcggacgggatttccatgggtacgccgggcatgtccttctcgttgcaatcgcgggatttgatcgcggatagcatcgagaccgtgatgggtggacagtggtacgacggaaatatttctctcccggggtgcgataagaacatgccgggtacgatcatggccatgggtcgattgaaccgcccgtcgctgatgatttacggcggtaccattcgccctggccactccgccgtggatggtggcacactcgatatcgtatccgcgttccaatcgtacggacagttcgttaccggcgctatcacggaggaacagcgcaaagacatcgtgcgtaactcttgcccgggctctggcgcgtgcggcggcatgtacaccgccaacaccatggccagctgcatcgaggctctcggcatgactcttccgtattcttcctccattcccgcggaagatcctctcaagatggatgaatgtttcatggctggcgctgcgatgaagcatttgctcgaaatcgacctgaagccgcgtgacatcatgactcgcgcggcgttcgaaaacgccatggtcaccgtcatcgctctcggcggttccaccaacgcggttcttcacttgatcgcgatggcgcactctgtcggcatcaaattgactctggacgacttccaagccgtctccaacaagacgccgttcatcgctgacttaaagccgtccggtaagtacgtcatggaggacgtccacaaggttggcggcactccggcggtgttgaagtatttgatgtctgaaggcatgattgacggttcttgcatgactgtcaccggtaagaccctcgccgagaacctcgccatctgcccggatttgacgccggggcaagatgttattctcccggtgagcacgcccatcaagaagactggtcacttgcaatgcttgtacggcaacatcgcccagggaggctccgtggcgaagatcaccggtaaggaaggcttgtactttaaaggcttcgcgaagtgctacgatagcgaagaggaaatgctcgaggccttggcggcagactccgagtctttcaagggtagcgtcatcgtcattcgctacgaaggtccgaagggtggtccgggcatgccggagatgctcacgccgacgtcggccatcatgggtgccggtctcgggaacgactgcgcgctcatcacggatggtcgattctccggtggctcgcacggtttcgtcatcggtcacgttacgccggaagcgcaagttggtggtaacatcggtttgatcaaggacggtgatatcatcgaaattgatgccgaagttcgcaccatcaacgcgccggatgtcaccgacgccgagtgggaaaagcgtcgagcggcgtggaaggcgccgcctttggaagcgacgtcgggtacgctctacaagtactgcaagctcgtcgccagcgcttcggaaggctgcatcacggacttgtga

SEQ ID NO: 48 - protein, 567 aa, Ostreococcus lucimarinus
MPDGDASDLNKWSRKITQPKSQGASQAMLYATGLTEADMNKPQIGVSSVWWQGNPCNKHLLDLAGKVAEGVKAADMVSFQFNTVGVSDGISMGTPGMSFSLQSRDLIADSIETVMGGQWYDGNISLPGCDKNMPGTIMAMGRLNRPSLMIYGGTIRPGHSAVDGGTLDIVSAFQSYGQFVTGAITEEQRKDIVRNSCPGSGACGGMYTANTMASCIEALGMTLPYSSSIPAEDPLKMDECFMAGAAMKHLLEIDLKPRDIMTRAAFENAMVTVIALGGSTNAVLHLIAMAHSVGIKLTLDDFQAVSNKTPFIADLKPSGKYVMEDVHKVGGTPAVLKYLMSEGMIDGSCMTVTGKTLAENLAICPDLTPGQDVILPVSTPIKKTGHLQCLYGNIAQGGSVAKITGKEGLYFKGFAKCYDSEEEMLEALAADSESFKGSVIVIRYEGPKGGPGMPEMLTPTSAIMGAGLGNDCALITDGRFSGGSHGFVIGHVTPEAQVGGNIGLIKDGDIIEIDAEVRTINAPDVTDAEWEKRRAAWKAPPLEATSGTLYKYCKLVASASEGCITDL

SEQ ID NO: 49 - DNA, 1695 bp, Vitis vinifera
atgcaagcagctctgataaccccttctcctcgcgccattcccaccggttccatcactgccacgagaaccacaattccccctcatgtgcgcctcgtgtctgtccgagcatcgaccgaggtagcccaatcgccgccacccgcagtgaaagagacggcccacaagctcaacaagtacagctctcatgtcaccgagcccaagtcccagggcggctcacaagccatcctctatggcgtgggtctctcggatgaggacatgcacaagcctcaaatcggtatatcatcggtttggtacgagggcaacacctgcaacatgcatttgttgaagctttcagaggctgtgaaggagggggtgagagatgccggcatggttgggttcaggttcaacactgttggtgtcagcgatgccatctcaatgggcacgagaggcatgtgctatagcttgcagtctagggatttgattgctgatagtattgagacggtcatgtctgctcagtggtatgatggcaacatttctattcccggttgtgacaaaaatatgccaggtacaataatggcaatgggacggctcaatcgacctagtattatggtttatggtggagctatcaagcctggtcattttcaaggccatacttacgacataatatctgcctttcaggtttatggagagttcgtcagtgggtccataactgatgaacagaggatgaatgttgtccgaaattcatgcccaggagcaggagcttgtggtggaatgtatacagccaatacgatggcttctgctattgaagttatgggaatgtctcttcccttcagctcttcaacaccggctgaagacccattgaagttgcatgagtgccatttggctggaaaatatcttctggatttgataaaaatggacttaaaaccacgagatattatcactatgaagtcactacggaatgctatggttgttgtcatggcattgggtggatctaccaatgctgtattacatttaattgccattgcaaggtctgttggtctgcagttaactcttgatgattttcagaaagtaagtgatgaggttccattccttgctgatcttaagcccagtggcaaatacgtcatggaggacatacacaagattggaggaacaccggcaatcattcgcttccttttggaaaatgggtttttagatggggattgtataacagttactgggaagacattggctgaaaatgcagaactttttccttctttgcccagagatcagcaaataataagaccgttggcaaaccccataaagaagactggacacctccaaactttatatggaaatcttgcaccagagggttctgttgcaaaaattactggaaaagaagggctatatttctctggtcctgcacttgtctttgaaggtgaggaagctatgattgcagctatagcagagaatcctatgagctttaaggggaaagtagttattattagaggagagggacccaagggggggccaggaatgcctgaaatgttgactccaacaagcgcaataatgggagcaggtcttgggaaggatgttgctttgttgactgatggtaggttttcaggaggttcacatggatatgttgttggccacatatgtcctgaagcacatgtacattttcttttccttcatccagttttatttttttatttttttgatcagaaacgaagaagattatattaa

SEQ ID NO: 50 - protein, 564 aa, Vitis vinifera
MQAALITPSPRAIPTGSITATRTTIPPHVRLVSVRASTEVAQSPPPAVKETAHKLNKYSSHVTEPKSQGGSQAILYGVGLSDEDMHKPQIGISSVWYEGNTCNMHLLKLSEAVKEGVRDAGMVGFRFNTVGVSDAISMGTRGMCYSLQSRDLIADSIETVMSAQWYDGNISIPGCDKNMPGTIMAMGRLNRPSIMVYGGAIKPGHFQGHTYDIISAFQVYGEFVSGSITDEQRMNVVRNSCPGAGACGGMYTANTMASAIEVMGMSLPFSSSTPAEDPLKLHECHLAGKYLLDLIKMDLKPRDIITMKSLRNAMVVVMALGGSTNAVLHLIAIARSVGLQLTLDDFQKVSDEVPFLADLKPSGKYVMEDIHKIGGTPAIIRFLLENGFLDGDCITVTGKTLAENAELFPSLPRDQQIIRPLANPIKKTGHLQTLYGNLAPEGSVAKITGKEGLYFSGPALVFEGEEAMIAAIAENPMSFKGKVVIIRGEGPKGGPGMPEMLTPTSAIMGAGLGKDVALLTDGRFSGGSHGYVVGHICPEAHVHFLFLHPVLFFYFFDQKRRRLY

SEQ ID NO: 51 - DNA, 1839 bp, Vitis vinifera
atgcaagtagctctgataaccccttctcctcgcgccattcccaccggttccatcactgccacgagaaccacaattccccctcatgtgcgcctcgtgtctgtccgagcatcgaccgaggtagcccaatcgccgccacccgcagtgaaagagacggcccacaagctcaacaagtacagctctcatgtcaccgagcccaagtcccagggcggctcacaagccatcctctatggcgtgggtctctcggatgaggacatgcacaagcctcaaatcggtatatcatcggtttggtacgagggcaacacctgcaacatgcatttgttgaagctttcagaggctgtgaaggagggggtgagagatgccggcatggttgggttcaggttcaacactgttggtgtcagcgatgccatctcaatgggcacgagaggcatgtgctatagcttgcagtctagggatttgattgctgatagtattgagacggtcatgtctgctcagtggtatgatggcaacatttctattcccggttgtgacaaaaatatgccaggtacaataatggcaatgggacggctcaatcggcctagtattatggtttatggtggagctatcaagaggcagattgacaattataattgggatcccaatcataccatcctgtgtagtgtggcacaccactttatactgagatatgaaatgttgtatgaagtcatctttgagaaatggcatgatcctggtcattttcaaggccatacttacgacataatatctgcctttcagctatggtctgaaggaggtgtatgtgtagtatcacttgtcccatggtttatggagagttcgtccagtgggtccataactgatgaacagaggatgaatgttgtccgaaattcatgcccaggagcaggagcttgtggtggaatgtatacagccaatacgatggcttctgctattgaagttatgggaatgtctcttcccttcagctcttcaacaccggctgaagacccattgaagttgcatgagtgccatttggctggaaaatatcttctggatttgataaaaatggacttaaaaccacgagatattatcactatgaagtcactacggaatgctatggttgttgtcatggcattgggtggatctaccaatgctgtattacatttaattgccattgcaagaattgctcatgataagattcttggcaggtctgttggtctgcagttaactcttgatgattttcagaaagtaagtgatgaggttccattccttgctgatcttaagcccagtggcaaatatgtcatggaggacatacacaagattggaggaacaccggcaatcattcgcttccttttggaaaatgggtttttagatggggattgtataacaggtcctgcacttgtctttgaaggtgaggaagctatgattgcagctatagcagagaatcctatgagctttaaggggaaagtagttattattagaggagagggacccaaggggggcccaggaatgcccgaaatgttgactccaacaagcgcaataatgggagcaggtcttgggaaggatgttgctttgttgactgatggtaggttttcaggaggttcacatggatatgttgttggccacatatgtcctgaagcacatgaaggtggtcccattggtctcattgaaaatggagatatcatcacaattgatgtccaaaaaaggagaatggatgtccagctgacagatgaagagatgaatgagcgaagaaagaaatggagtcccccaccatataaggctaaccaaggagttctatacaagtacatcaagaacgtaaaatcggcttcagatgggtgtgtgacggatgaataa

SEQ ID NO: 52 - protein, 612 aa, Vitis vinifera
MQVALITPSPRAIPTGSITATRTTIPPHVRLVSVRASTEVAQSPPPAVKETAHKLNKYSSHVTEPKSQGGSQAILYGVGLSDEDMHKPQIGISSVWYEGNTCNMHLLKLSEAVKEGVRDAGMVGFRFNTVGVSDAISMGTRGMCYSLQSRDLIADSIETVMSAQWYDGNISIPGCDKNMPGTIMAMGRLNRPSIMVYGGAIKRQIDNYNWDPNHTILCSVAHHFILRYEMLYEVIFEKWHDPGHFQGHTYDIISAFQLWSEGGVCVVSLVPWFMESSSSGSITDEQRMNVVRNSCPGAGACGGMYTANTMASAIEVMGMSLPFSSSTPAEDPLKLHECHLAGKYLLDLIKMDLKPRDIITMKSLRNAMVVVMALGGSTNAVLHLIAIARIAHDKILGRSVGLQLTLDDFQKVSDEVPFLADLKPSGKYVMEDIHKIGGTPAIIRFLLENGFLDGDCITGPALVFEGEEAMIAAIAENPMSFKGKVVIIRGEGPKGGPGMPEMLTPTSAIMGAGLGKDVALLTDGRFSGGSHGYVVGHICPEAHEGGPIGLIENGDIITIDVQKRRMDVQLTDEEMNERRKKWSPPPYKANQGVLYKYIKNVKSASDGCVTDE

SEQ ID NO: 53 - DNA, 1827 bp, Arabidopsis thaliana
atgcaagccaccatcttctctccacgcgccactctcttcccctgtaaacctctcctcccttcccacaatgtcaactctcgccgtccctcaatcatctcctgctccgcccaatccgtaaccgctgatccttcaccacctatcactgacaccaataagctcaacaaatacagctcaagaatcactgaacccaaatcccaaggtgggtctcaagcaattcttcacggtgttggtttatcagacgacgatttgctaaaaccccagattggtatctcgtcggtttggtatgaagggaacacttgtaacatgcatttgctgaaattgtctgaggctgtgaaagaaggagttgaaaatgcaggaatggttgggtttaggtttaatactattggtgtgagtgatgctatttcgatgggaacgagagggatgtgttttagtttgcaatctagggatttgattgctgatagtattgagactgttatgagtgctcagtggtatgatggtaacatatctattcccggttgtgataaaaatatgcctggaactattatggctatgggaaggcttaacagaccagggattatggtttatggtggaaccattaagcctggccattttcaagacaagacatatgacattgtatctgctttccagagttatggagaatttgttagtggctccataagtgatgaacagagaaagactgtcctccatcattcatgtcctggagctggagcctgtggtggcatgtacacagcgaatacaatggcttctgctatcgaagcaatgggaatgtcccttccttacagttcttcaatacctgctgaagacccattgaagttggacgagtgtcgcttagcaggaaaatatcttctagaattgctaaagatggacttaaaaccccgtgacattatcactccaaaatcacttcgtaatgcaatggtttccgtcatggcccttgggggatcgacaaatgcagtattgcatctaattgctattgcaaggtctgttggtttggagttgactcttgacgattttcagaaagttagcgatgcggttccatttctagcagatcttaaacccagtgggaagtatgttatggaggatatacataagataggtggtacgccagctgttctccgctatttattagagctaggattgatggatggtgattgtatgacagtgacagggcagactttggctcaaaatttagaaaacgtcccaagcttaacagaagggcaggagataattagacctctgtcaaatccaatcaaggagactggacacatacaaattttgagaggagaccttgcaccagatggttctgtagcaaaaattaccggcaaagagggcttatatttctctggtcctgcacttgtatttgaaggagaggaatctatgttggctgctatatcagcagacccaatgagttttaagggaactgtggttgttatcagaggagaggggcctaaaggaggtccaggtatgcctgagatgttgacaccgacaagtgcaataatgggtgccggtcttggaaaggaatgtgcattactgactgatggtaggttctctggtgggtcacacggttttgttgttggccacatttgccctgaagctcaggagggtggtccgatcggtctgatcaagaacggagacataatcaccattgacataggaaagaagagaatagacacacaagtctcacccgaagaaatgaatgaccgtagaaagaaatggactgctcctgcatacaaggttaaccgcggagtcctatataagtacatcaagaacgtgcaatcggcttcagatggatgtgtgactgacgagtaa

SEQ ID NO: 54 - protein, 608 aa, Arabidopsis thaliana
MQATIFSPRATLFPCKPLLPSHNVNSRRPSIISCSAQSVTADPSPPITDTNKLNKYSSRITEPKSQGGSQAILHGVGLSDDDLLKPQIGISSVWYEGNTCNMHLLKLSEAVKEGVENAGMVGFRFNTIGVSDAISMGTRGMCFSLQSRDLIADSIETVMSAQWYDGNISIPGCDKNMPGTIMAMGRLNRPGIMVYGGTIKPGHFQDKTYDIVSAFQSYGEFVSGSISDEQRKTVLHHSCPGAGACGGMYTANTMASAIEAMGMSLPYSSSIPAEDPLKLDECRLAGKYLLELLKMDLKPRDIITPKSLRNAMVSVMALGGSTNAVLHLIAIARSVGLELTLDDFQKVSDAVPFLADLKPSGKYVMEDIHKIGGTPAVLRYLLELGLMDGDCMTVTGQTLAQNLENVPSLTEGQEIIRPLSNPIKETGHIQILRGDLAPDGSVAKITGKEGLYFSGPALVFEGEESMLAAISADPMSFKGTVVVIRGEGPKGGPGMPEMLTPTSAIMGAGLGKECALLTDGRFSGGSHGFVVGHICPEAQEGGPIGLIKNGDIITIDIGKKRIDTQVSPEEMNDRRKKWTAPAYKVNRGVLYKYIKNVQSASDGCVTDE

SEQ ID NO: 55 - DNA, 1785 bp, Oryza sativa
atgcagtcgcttgccctcacctccccctcccttccggcgccggcgaccgcatccggccgccgccgccgccgcctggagcgcatccgcgccaccgcggtgtccgacgagccgaagctgaacaagtacagcgcgcgcatcacggagcccaagtcgcagggggcgtcgcaggcggtgctctacggcgtggggctcaccgacgccgacctccgcaagccgcaggtgggcgtctcctctgtctggtacgagggcaacacctgcaacatgcaccttctccgcctcgccgaggccgtcagggacggcgtccgcgaggccggcatggtggccttccgcttcaacaccgtcggggtcagcgacgccatctccatgggcacccggggcatgtgctacagcctccagtcgcgcgacctcatcgccgacagcatcgagaccgtcatgggcgcgcagcactacgacgccaacatctccattcctggatgcgacaagaacatgccaggaacaataatggcaatggggcggctgaaccgaccaagtatcatgatatatggtggaactattaagcctggtcattttcagggtaattcttatgacatagtatctgctttccagtgctatggagaatttgttaccggatcaatcagtgatgagcaaagaaagaatgtgctccgcaactcatgcccaggagcaggtgcgtgtggtggtatgtacaccgcgaacacaatggcatccgccatcgagaccatgggtatgagccttccgtacagttcttcaacccctgctgaagacccactaaagctagaggaatgccgtcttgctgggaagtatcttttagaattgttaaagatggatttgaagcctgaagacattatcactgagaaatctttgcggaacgcaatggtcattgtcatggcacttggtgggtctactaatgctgttttgcatttaattgctatcgctaggtctgtaggtctgcaattaactcttgatgattttcagaaggtcagtgaccaagttcctttccttgcggaccttaagcctagtggcaaatatgtcatggaggatctgcataagattggtggaacacctgcagtaattcattatcttctggagcaaggtcttcttgatggtgattgtatgaccgtcactgggaaaactctagcggaaaatgctaaaatcttccctcctctgtccgaaggacagcaaataataaggcccctggacaacccaatcaaatcaactggtcatatacaaatactttatggcaatcttgcaccagaaggttctgtagcaaaaattactggcaaagaggggatgtttttctcaggccctgcactagtgtttgagggtgaagaatctatgattacagctatatcagaaaacccagcgaatttcaaggggaaggtagtagtgatacgaggagaaggaccgaaaggtggaccagggatgcctgaaatgctgactccaactagtgcaataatgggtgctggtcttgggaaggagtgtgccctgctgaccgatggcagattttctggaggatcacatggatttgttgtaggccacatttgtcctgaagcacaggagggaggtccaattggtcttgttcaaaacggtgacaaaattaccattgatgttgtgaagagagtaattgatgttgaactgactgaagctgagctggaagaaagacggaggaaatggacgccgccgccacacaaggctgcccgtggagcgctttggaagtacacgaagctcgtgtcccctgcatcaagaggatgcgtcaccgatgagtag

SEQ ID NO: 56 - protein, 594 aa, Oryza sativa
MQSLALTSPSLPAPATASGRRRRRLERIRATAVSDEPKLNKYSARITEPKSQGASQAVLYGVGLTDADLRKPQVGVSSVWYEGNTCNMHLLRLAEAVRDGVREAGMVAFRFNTVGVSDAISMGTRGMCYSLQSRDLIADSIETVMGAQHYDANISIPGCDKNMPGTIMAMGRLNRPSIMIYGGTIKPGHFQGNSYDIVSAFQCYGEFVTGSISDEQRKNVLRNSCPGAGACGGMYTANTMASAIETMGMSLPYSSSTPAEDPLKLEECRLAGKYLLELLKMDLKPEDIITEKSLRNAMVIVMALGGSTNAVLHLIAIARSVGLQLTLDDFQKVSDQVPFLADLKPSGKYVMEDLHKIGGTPAVIHYLLEQGLLDGDCMTVTGKTLAENAKIFPPLSEGQQIIRPLDNPIKSTGHIQILYGNLAPEGSVAKITGKEGMFFSGPALVFEGEESMITAISENPANFKGKVVVIRGEGPKGGPGMPEMLTPTSAIMGAGLGKECALLTDGRFSGGSHGFVVGHICPEAQEGGPIGLVQNGDKITIDVVKRVIDVELTEAELEERRRKWTPPPHKAARGALWKYTKLVSPASRGCVTDE

SEQ ID NO: 57 - DNA, 1767 bp, Physcomitrella patens
atggtggtggcgtcgtcgagcgcggaaggggctgtggccgcgccgcccccgcagtccgtggaggcgccggctgggagcgccacggacagcgcgaagctgaacaagtactcaagccgcgtgacccagcctaaggcgcagggcgcctcgcaggcgattctgtacggggtggggttgtccgaggaggatatgaacaagccgcaggtgggaatctcgtcggtttggtacgagggcaacacgtgcaatatgcatttgctgcatttgtctgaggctgtgaaggagggggtgaaggaggccgggatggtggggttccgattcaacactgtgggagttagtgacgccgtgtccatgggaaccgaggggatgtgctacagcctgcagtcgcgcgatttgattgcggacagtgtggagactgttatgggcgggcagtggtacgacgccaacatttccattccggggtgtgataagaacatgcccggggtggtcatggccatggggcggctgaacaggcccagcattatgatttatgggggcaccatcaagccaggtcattttaacggacagacgctcgacatcgtttcagccttccagagctacggagagtatgtgagcgggtccatctccgaggatgagaggatggacgttgtaaggaattcttgccccggattcggagcttgtggaggaatgtacaccgccaacaccatggcgtccgccattgaagcgctaggcatgtcgctgccgtacagctcttccatccccgccgaggacccgttgaagatcgaggaatgcaaattggccgggaaatacattctggagcttctaaagcgtgacttgaagccgcgtgacattatcacccgaaagtcgctcaacaacgctatggtggttgtcatggcgctcggaggttccacgaatgcggtgcttcatctcatcgccatcgctcgttctgtgggcgttgagctcacattggacgatttccaggacgtgagcgacaagaccccgttcattgctgatcttaaacctagcgggaagtacgtgatggaggatttgcacaaaattggaggcgtgcctgccgtactgaagtacttgttagaaaaagggctaatcgacgggagctgcatgacagtcacggggaagaccatcgctgagaacctcgctgagtgcccgcccctctccgaaggtcagaagatcatcatgcctctcgaaaaccccatcaaaaaaactggtcacttgcaaattctgtggggcaaccttgctccagagggttccgttgctaaaattacaggcaaagaaggcttgtacttttctggccccgcccgtgtatttgagggagaggaagccatgctggacgctatcactgaggaccctcagagcttgaagggtactgtgatcgttatccgaggggagggtcctaagggtggcccgggcatgcctgagatgctcacccccacgagtgctgtaattggagctggacttggcaaggaagtagcgcttctgaccgacggtcgattctctggtggctctcacggcttcgttgttgggcacatctgcccagaagctcaagtaggtggcccgattgggcttgtacgtgatggagacgtgatcaccatcgacgtggagaagaggaaaatcaacgtcgatttgacggcacaagagcttgcggatcgaaaactcctgtggagagctcccccttacaaggcctctcgtggaaccctttacaagtacatcaagaatgtcaaatcagcgtccgaaggttgcgtgactgatgagtga

SEQ ID NO: 58 - protein, 588 aa, Physcomitrella patens
MVVASSSAEGAVAAPPPQSVEAPAGSATDSAKLNKYSSRVTQPKAQGASQAILYGVGLSEEDMNKPQVGISSVWYEGNTCNMHLLHLSEAVKEGVKEAGMVGFRFNTVGVSDAVSMGTEGMCYSLQSRDLIADSVETVMGGQWYDANISIPGCDKNMPGVVMAMGRLNRPSIMIYGGTIKPGHFNGQTLDIVSAFQSYGEYVSGSISEDERMDVVRNSCPGFGACGGMYTANTMASAIEALGMSLPYSSSIPAEDPLKIEECKLAGKYILELLKRDLKPRDIITRKSLNNAMVVVMALGGSTNAVLHLIAIARSVGVELTLDDFQDVSDKTPFIADLKPSGKYVMEDLHKIGGVPAVLKYLLEKGLIDGSCMTVTGKTIAENLAECPPLSEGQKIIMPLENPIKKTGHLQILWGNLAPEGSVAKITGKEGLYFSGPARVFEGEEAMLDAITEDPQSLKGTVIVIRGEGPKGGPGMPEMLTPTSAVIGAGLGKEVALLTDGRFSGGSHGFVVGHICPEAQVGGPIGLVRDGDVITIDVEKRKINVDLTAQELADRKLLWRAPPYKASRGTLYKYIKNVKSASEGCVTDE

SEQ ID NO: 59 - DNA, 1800 bp, Chaetomium globosum
atgctctctccgtctctgctgcgcactggcgctcccagggccctggccatgagccgggtcttgccttttaggaaccagtaccgtctcctatccacaacaccccgccggtatgccgacgagaagctcaaccggatttcctccaagatcacacaaccgaagtcgcagggtgcctcccaggctatgctctacggtaccggcttgaccgaggcagacatgtccaaggcccaggtcggcatctcgtccgtctggtacgagggcaacccctgcaacatgcacctgatggagctctctggccatgtccgcaacagcatcgaaaaggccgggctcgtccctatgcgcttcaacaccatcggtgtttctgacggcatcagcatgggcaccacgggcatgcgctacagcttgcagagcagagagatcatcgccgacagcatcgagacggtcatgcagggccagtggtacgacgccaacgtgtcgctgcccggctgcgacaagaacatgcctggtgtcctgatcgccatgggccgcgtcaacaggcctagcattatggtctacggtggcaccatcaagccgggctgcaccatgaagggcgagcccatcgacatcgtcagcgccttccaggcgtacggccagtacatctcgggcgagatcgacgagaagcagcgcttcgacatcatccgcaacgcctgccctggcggcggcgcctgcggtggcatgtacacggccaacaccatggcctcggcgatcgagaccctcggcatgaccctccctggcagcagcagcttcccggccgaggacgcgcgcaagaaggccgagtgcgagagcgtgggcgaggccatcaagaacctcctccgcgagaacatccggcctagcgacatcctgacccgacaggcgtttgagaacgccatggtcgtcgtcggcgtgctgggcggcagcaccaacgctgtgctgcacctcatcgccatcgccgactcggtcggcatcaagctcactatcgacgacttccaagccgtctcggaccgtatccctttactcgccgatctgaagccctcaggcaagtacgttatggaggacctgttcaagatcggcggcaccccggcgctgctcaagttcctcctcaaggagggcctcctcgacggctcgggcattaccgtgactggtaagaccatgaaggagaacgtcgccgacctgcccggcttccccgcggaccagcccatcatccgccccctaaacaacccgctcaagccgacgggccacatccagatcctgcgcggctcgctcgcccccggcgggtcggtgggcaagatcacgggcaaggagggcctccggttcgagggcacggccaaggtgtacgactacgaggatgccttcatcgaggcgctggagcggggcgagatcaagaagggcgagaagacggtggtggtgatccggtacgagggccccaagggcgggcccggcatgcccgagatgctcaagcccagctcggccatcatgggcgccgggctcggccaggacgtcgccctcatcaccgacggccgcttctccggcggcagccacggcttcctcatcggccacatcgtgcccgaggccatggaaggcgggcccatcggcctagtccgcgacggcgacaagattgtcatcgacgccgacaagcgcgtcctcgacctcgaggtgcccgccgacgaaatggcgcgccgcaaggccgagtggaaggcccccgagcccagggccaagcgcggtaccctgaagaaatacgcctcgctggtcagcgatgccagccaggggtgtgtcaccgacaaatag

SEQ ID NO: 60 - protein, 599 aa, Chaetomium globosum
MLSPSLLRTGAPRALAMSRVLPFRNQYRLLSTTPRRYADEKLNRISSKITQPKSQGASQAMLYGTGLTEADMSKAQVGISSVWYEGNPCNMHLMELSGHVRNSIEKAGLVPMRFNTIGVSDGISMGTTGMRYSLQSREIIADSIETVMQGQWYDANVSLPGCDKNMPGVLIAMGRVNRPSIMVYGGTIKPGCTMKGEPIDIVSAFQAYGQYISGEIDEKQRFDIIRNACPGGGACGGMYTANTMASAIETLGMTLPGSSSFPAEDARKKAECESVGEAIKNLLRENIRPSDILTRQAFENAMVVVGVLGGSTNAVLHLIAIADSVGIKLTIDDFQAVSDRIPLLADLKPSGKYVMEDLFKIGGTPALLKFLLKEGLLDGSGITVTGKTMKENVADLPGFPADQPIIRPLNNPLKPTGHIQILRGSLAPGGSVGKITGKEGLRFEGTAKVYDYEDAFIEALERGEIKKGEKTVVVIRYEGPKGGPGMPEMLKPSSAIMGAGLGQDVALITDGRFSGGSHGFLIGHIVPEAMEGGPIGLVRDGDKIVIDADKRVLDLEVPADEMARRKAEWKAPEPRAKRGTLKKYASLVSDASQGCVTDK

SEQ ID NO: 61 - DNA, 1791 bp, Neurospora crassa
atgctcgctccctcccttctgcgggctcaggcccccagagctctggcttctgcccgtctctccctccgctccctctccaccactccccgccgctacaatgcccaggagaagcagctcaacaaggtgtcggccaacatcacccagcccaagtctcagggtgcttcccaggccatgctctacgccaccggcctcaacgaggacgacatgaacaaggcccaggtcggtatctcgtctgtctggtatgagggcaacccttgcaacatgcaccttctcgacctctccggcctcgtcaaggagtccgttgccaaggctggcctcgtccccatgcgcttcaacaccatcggtgtctcggacggtatctccatgggtaccaccggtatgcgctacagcttgcagtcccgtgagattattgccgactccatcgagaccgtcatgaacggccagtggtacgacgccaacatctccctccccggttgcgacaagaacatgcccggtgtcctcatcgccatgggccgtgtcaaccgcccctccatcatggtctacggtggtaccatcaagcccggctgcaacatgaagggcgagaacatcgatatcgtttccgccttccaggcatacggccagtacatctccggtgagatcgacgagaagcagcgcttcgatatcatccgcaacgcctgccctggtggtggcgcctgcggtggcatgtacactgccaacaccatggccaccgccatcgagaccctcggcatgacccttcccggttcctcctcctaccccgccgagtctcccgagaagaagaacgagtgcttgagcgtcggtgaggccatcaagaacctcctccgcgaggacatccgccccaccgatatccttactcgccaggccttcgagaacgccatgatcgtcgtcaacattcttggcggttccaccaacgccgtcctccacttgattgccatcgccgactccgttggcatcaagctcaccatcgatgacttccaggccgtctccgaccgcactcctttccttgccgacctcaagccttccggcaagtgggtcatggaggaccttagcaagattggcggcacccccgcccttctcaaattcctcctcaaggagggaatcctcgacggctccggcatcacctcgaccggtaagaccatgaaggagaacgtcgagaagttccccgacttccccaccgaccaggccatcatccgccctctgtcgaaccccatcaaggaaaccggacacattcagatcctccgcggctctctcgctcccggcggttccgtcggcaagatcaccggcaaggagggtctccgtttcgagggtaaggctcgctgcttcgactacgaggacggctttattgaggctctcgagcgtggcgagatcaagaagggcgagaagaccgtcgtcgtcatccgctacgagggtcccaagggcggccctggcatgcccgaaatgctcaagccttcgtccgccattatgggctacggtctcggcaaggacgttgccctcatcactgacggccgcttctccggtggttctcacggcttcctcatcggccacattgtgcctgaggctatggagggtggccccattggtctcgtccgcgatggcgacaccatcgtcatcgacgccgagaagaaggttcttgaccttgaggttcctgaggaggagctcgccaagcgccgcaaggagtggaaggctcctgagcccaaggctaagcgtggtactctcaggaagtacgcccagctcgtcaaggatgctagctctggctgcgtcactgacgcttaa

SEQ ID NO: 62 - protein, 596 aa, Neurospora crassa
MLAPSLLRAQAPRALASARLSLRSLSTTPRRYNAQEKQLNKVSANITQPKSQGASQAMLYATGLNEDDMNKAQVGISSVWYEGNPCNMHLLDLSGLVKESVAKAGLVPMRFNTIGVSDGISMGTTGMRYSLQSREIIADSIETVMNGQWYDANISLPGCDKNMPGVLIAMGRVNRPSIMVYGGTIKPGCNMKGENIDIVSAFQAYGQYISGEIDEKQRFDIIRNACPGGGACGGMYTANTMATAIETLGMTLPGSSSYPAESPEKKNECLSVGEAIKNLLREDIRPTDILTRQAFENAMIVVNILGGSTNAVLHLIAIADSVGIKLTIDDFQAVSDRTPFLADLKPSGKWVMEDLSKIGGTPALLKFLLKEGILDGSGITSTGKTMKENVEKFPDFPTDQAIIRPLSNPIKETGHIQILRGSLAPGGSVGKITGKEGLRFEGKARCFDYEDGFIEALERGEIKKGEKTVVVIRYEGPKGGPGMPEMLKPSSAIMGYGLGKDVALITDGRFSGGSHGFLIGHIVPEAMEGGPIGLVRDGDTIVIDAEKKVLDLEVPEEELAKRRKEWKAPEPKAKRGTLRKYAQLVKDASSGCVTDA

SEQ ID NO: 63 - DNA, 1788 bp, Magnaporthe grisea
atgatgtcctcaaacctgctgcgcgccagggtgcccaaggccctggctgccaccaggagccatgcggccctcttctccacaacctcgcgccgcgctgagcaactgaacaagacttcggccaagatcacacagcccaagtcccagggtgcgtcacaggccatgctgtacgccaccggcttgaccgaggaggacatgaacaagccgcaggtcggcatctcgtcggtctggtacgagggcaacccctgcaacatgcacatcctcaagctgtcggagcggatccgcgactccgtcaaggccgccaacctggtccccatgcgcttcaacaccattggagtctcggacggtatcagcatgggcacgaccggcatgcgctattcgctgcagagccgtgagatcatcgccgacagtatcgagaccgtcatgcagggccagtggtacgatgccaacatctccatcccgggctgcgacaagaacatgcccggtgttctcatcgccctcggccgtgtcaaccgccccagtttgatcgtttacggcggtaccatcaagcccggctgcagccaaaagggcgagcccatcgacatcgtcagcgccttccaggcctacggccagtacctgactggtgagatcaccgaggagcagcggttcgacatcatccggaacgcgtgccccggcggtggtgcatgcggtggcatgtacactgccaacactttggcgtcggctatcgagactctgggcatgagcttgccgggaagcagcagcaaccccgcagagcaccccagcaagctggccgaatgtgaccaggttggcgaggccatcaagaacatcctccgtgaggacgtgcgcccccgcgacatcatgacgaggcaggcctttgagaacgccatggttgtagtcagcatccttggtggaagcaccaacgccgtcctgcacctgcttgccgttgccgatgcggtcggtgtcaagcttaccattgacgacttccaagccgtttccgaccggacaccgctcctggcagacctcaagccttcgggcaaatacgtcatggaggatgtacacaagattggtggcacgccatctctcctgcgcttcctggccaaggagggcttgatcgatgcttctggcatcaccgtcactggcaagaccatgaaggagaacttggacaagtaccccgacttcccggccgaccagcccatcatccggcctctcagcaaccccctcaagtccacgggccacatccagatcctccgcggtagtctcgcacccggtggctctgtcggcaagattaccggcaaggagggtcttcagttcactggcaaggcccgctgctacgactgcgaggacgactttatcgagtcgctcgagcgtggcgagatcaagaagggtgagaagacggttgtcatcatccgttacgagggccccaagggtggtcccggcatgcccgagatgctgaagcccagctcggccatcatgggtgccggtctcggcaaggacgttgccctcatcactgacggtcgcttctctggcggttcgcacggattcctcatcggacacgttgtgcccgaggccatggagggcggacctatcgcacttgttcgcgatggcgacaccattactattgatgcggagaagcgggtgatcgacacggacgtgtcggacaagaccatggcggagcgccgcgccgagtggaaggctcccccgatcagggagaccaggggaacgctggccaagtacgcagcgctggttagcgacgcgagcagtggttgcgtgacggacaaggtcgcgcgataa

SEQ ID NO: 64 - protein, 595 aa, Magnaporthe grisea
MMSSNLLRARVPKALAATRSHAALFSTTSRRAEQLNKTSAKITQPKSQGASQAMLYATGLTEEDMNKPQVGISSVWYEGNPCNMHILKLSERIRDSVKAANLVPMRFNTIGVSDGISMGTTGMRYSLQSREIIADSIETVMQGQWYDANISIPGCDKNMPGVLIALGRVNRPSLIVYGGTIKPGCSQKGEPIDIVSAFQAYGQYLTGEITEEQRFDIIRNACPGGGACGGMYTANTLASAIETLGMSLPGSSSNPAEHPSKLAECDQVGEAIKNILREDVRPRDIMTRQAFENAMVVVSILGGSTNAVLHLLAVADAVGVKLTIDDFQAVSDRTPLLADLKPSGKYVMEDVHKIGGTPSLLRFLAKEGLIDASGITVTGKTMKENLDKYPDFPADQPIIRPLSNPLKSTGHIQILRGSLAPGGSVGKITGKEGLQFTGKARCYDCEDDFIESLERGEIKKGEKTVVIIRYEGPKGGPGMPEMLKPSSAIMGAGLGKDVALITDGRFSGGSHGFLIGHVVPEAMEGGPIALVRDGDTITIDAEKRVIDTDVSDKTMAERRAEWKAPPIRETRGTLAKYAALVSDASSGCVTDKVAR

SEQ ID NO: 65 - DNA, 1797 bp, Gibberella zeae
atgctttcccggtcactgctgcgctctagagctgtgggagctttccccctctctgccaggaatcatggccgcttcctgtctaccacctccatccgctccgatgacaagctcaacaagatctcctccaacatcactcagcccaaggcccagggtgcttcccaggctatgctctacgccaccggcctctctgaagctgacatgaacaaggctcaagttggcatctcgtccgtctggtacgagggaaacccttgcaacatgcaccttatggacctctctgcccacgtcaaggagtctgtcgccaaggccggtcttattccctaccgattcaacaccatcggtgtctctgatggtatctccatgggtaccactggtatgcgatattccctccagagccgagagattattgccgatagtgttgagactgtcatgaacggtcaatggtatgacgccaacgtcagcttgcccggttgcgacaagaacatgcccggtgttgccattgccatgggtcgtgtcaaccgtcccagcatcatggtttacggtggtaccattaagcccggttgcaccaagcagggcgagtctatcgatatcgtctctgctttccaggcctacggtcaatacatcaccggcgagatcaccgaggagcagcgattcgacattatccgaaatgcctgccctggtggtggtgcttgtggtggcatgtacactgccaacaccatggctactgccattgagactctgggacttaccctccctggtagcagcagcagccctgctgaggaccccagcaagatcgccgagtgtgaggctgttggacctgctatccgcaacattctcaaggaagatatccgacctcgtgacatcatgactcgccaagcctttgagaatgccatgatcgtcactaccatccttggtggcagcaccaacgctgttctgcatcttatcgcaattgccgactctgtcggtatcaagctcgacatcgaggacttccaaaaggtttccgaccgcactcccttccttgccgacctgaagccctctggaaagtgggtcatggccgatatgcacaagattggtggtactcctgctcttctcaagttcctcttgaaggagggtatcattgacggctctggtatcactgtcactggcaagaccatgaagcagaacgtcgaggagttgcctggattccccgaggatcaaaccatcattcgcccccttagcaaccccattaagcctaccggtcacatccagattctccgtggatccctggctcctggtggctgtgttggtaagatcactggcaaggagggtctccgattcgagggtaaggcccgtgtctacgactccgagcccgccttcatctctagccttgaggctggtgagatcaagaagggtgagaagactgtcgttatcatccgatatgatggacccaagggtggccccggtatgcctgagatgctgaagccttcttctgccattatgggtgctggccttggacaggatgtcgcccttctcactgacggtcgcttctctggtggttctcacggtttcattattggtcacattgtccccgaggcaatggagggtggccctatcgcccttgtcgaggacggtgacaccatcgttatcgacgccgagtctcgtgctatcgacctcgttgttcccgaggcagaggttgatcgccgtcgcaaggcctggaaggctcccgctccccgatacaccaagggcacactcagcaagtacgctcgactggtgaccaacgccagtgagggctgtgtcaccgatagcggtctcaagaactaa

SEQ ID NO: 66 - protein, 598 aa, Gibberella zeae
MLSRSLLRSRAVGAFPLSARNHGRFLSTTSIRSDDKLNKISSNITQPKAQGASQAMLYATGLSEADMNKAQVGISSVWYEGNPCNMHLMDLSAHVKESVAKAGLIPYRFNTIGVSDGISMGTTGMRYSLQSREIIADSVETVMNGQWYDANVSLPGCDKNMPGVAIAMGRVNRPSIMVYGGTIKPGCTKQGESIDIVSAFQAYGQYITGEITEEQRFDIIRNACPGGGACGGMYTANTMATAIETLGLTLPGSSSSPAEDPSKIAECEAVGPAIRNILKEDIRPRDIMTRQAFENAMIVTTILGGSTNAVLHLIAIADSVGIKLDIEDFQKVSDRTPFLADLKPSGKWVMADMHKIGGTPALLKFLLKEGIIDGSGITVTGKTMKQNVEELPGFPEDQTIIRPLSNPIKPTGHIQILRGSLAPGGCVGKITGKEGLRFEGKARVYDSEPAFISSLEAGEIKKGEKTVVIIRYDGPKGGPGMPEMLKPSSAIMGAGLGQDVALLTDGRFSGGSHGFIIGHIVPEAMEGGPIALVEDGDTIVIDAESRAIDLVVPEAEVDRRRKAWKAPAPRYTKGTLSKYARLVTNASEGCVTDSGLKN

SEQ ID NO: 67 - DNA, 1797 bp, Aspergillus niger
atgttcgcgtcgagtatccgatcgagagctctgggattgagcccacgagcccggtttgagaatactcgtcttccatcttccactagcgggcgccgttatagatccgatgagcccctcaaccgaatttcctcgaaaatcacacaacccaaatcccagggtgcttcgcaagcaatgctctacgccaccggcctaacagaggaagacatgtccaagccacaggtcggtatctcctcggtgtggttcgagggtaacccatgcaacatgcacttgcatgacctgtctgccattgtgcgcgattccgtgctccgtgcgggtctggtccctatgcgattcaactcagttggagtgtcggatgggatcagtatgggtacaaagggaatgagatacagcctgcagagccgggagctgatcgctgatggtattgagacggtgatgaatgcccagtggtacgatgcgaatgtgtcgctcccgggttgtgataagaatatgccaggtgtattaatagcgatgggacgcacgaaccgacctagcatcatggtctacggtggcagtatcaagcctggatgcagtgcaaagggccagaaattggacctggtcagtgcattccagtcatatggccagttcatcaccggccagatcgacgagaaggagcggttcgatatcattcgcaatgcatgccccggcagaggtgcatgcggtggcatgtacacggctaatacgctggccacggctattgagactatgggaatgactattcctggtagtagtagttgcccggcagatgatcgcaagaagctagttgagtgcgaaaatattggcgaggtggttaaaaatatgctcagggaagatatcaaacccagggatatcttaacacgtcaagccttcgagaatgcaatgattgtagtgaacgtgctgggtggcagtactaatgctgttttacatctgattgccattgctgactctgtcggtatcaagttgactattgatgacttccaggcagtatctgataagacaccgttcctggctgatttgaagccatctggaaagtatcttatgaatgatctttataatatcggtggcacaccagccctcctgaaatatctcctgaaggagggcttgatcgatggctcaggagttactgttaccggtaaaacaatgaaggaaaatgtagcctcatggcctgattttcctgctgaccaggatatcatccgccccctcaacaaccctatcaaaccatctggccatctccagattcttcgcggatcgctggccccgggcggttccgtgggtaagattactggaaaggagggtctgcggtttgagggtatagctaaatgctatgattacgaagatgcattcattgagtcccttgagcggggtgagatcaagaagggcgagaaaacagtcgtgattatccggtatgaaggccccaagggtggcccaggaatgcctgagatgctcaagcccagcgcggccattatgggcgctggacttggccaggacgttgctcttcttacagatggaagattctcgggtggcagtcacggatttttgatcggacatatcgtgccggaagccatggaaggcggcccgatcgcgttggctcgagacggtgatcggatcgtgattgatgctgaggaaagagtggtcgatctggatatctctactgaggagctcgagaagaggaggaaggagtggaacgcacccccgctccggtaccagaagggaactctgaagaaatattgcacgctggtcagcgacgccagccatggttgtgtcacggacggaccgatatag

SEQ ID NO: 68 - protein, 598 aa, Aspergillus niger
MFASSIRSRALGLSPRARFENTRLPSSTSGRRYRSDEPLNRISSKITQPKSQGASQAMLYATGLTEEDMSKPQVGISSVWFEGNPCNMHLHDLSAIVRDSVLRAGLVPMRFNSVGVSDGISMGTKGMRYSLQSRELIADGIETVMNAQWYDANVSLPGCDKNMPGVLIAMGRTNRPSIMVYGGSIKPGCSAKGQKLDLVSAFQSYGQFITGQIDEKERFDIIRNACPGRGACGGMYTANTLATAIETMGMTIPGSSSCPADDRKKLVECENIGEVVKNMLREDIKPRDILTRQAFENAMIVVNVLGGSTNAVLHLIAIADSVGIKLTIDDFQAVSDKTPFLADLKPSGKYLMNDLYNIGGTPALLKYLLKEGLIDGSGVTVTGKTMKENVASWPDFPADQDIIRPLNNPIKPSGHLQILRGSLAPGGSVGKITGKEGLRFEGIAKCYDYEDAFIESLERGEIKKGEKTVVIIRYEGPKGGPGMPEMLKPSAAIMGAGLGQDVALLTDGRFSGGSHGFLIGHIVPEAMEGGPIALARDGDRIVIDAEERVVDLDISTEELEKRRKEWNAPPLRYQKGTLKKYCTLVSDASHGCVTDGPI

SEQ ID NO: 69 - DNA, 1875 bp, Neosartorya fischeri
atgttcgcgtcgagtatccgatcgagagctctgggattgagcccacgagcccggtttgagaatacgtacgagaggaccttccctcgcattgcttctctctccctcctcaaaaatcggcaaatactaataactatcgttactagtcgtcttccatcttccactaccgagcgccgttataaatccgacgagaccctcaaccgaatctcctcgaaaatcacacaacccaaatcccagggtgcctcacaagcaatgctctacgccaccggcctgacagaggaagacatgtccaagccgcaggtcggtatctcctcggtgtggttcgagggtaacccatgtaacatgcacttgcatgacctgtctgcgattgtgcgtgattccgtgcttcgggcgggtctggttcctatgcgattcaactcggttggagtgtcggatgggatcagtatgggcacaaagggaatgagatacagcctacagagtcgggagctgatcgctgatggcattgagacagtgatgaatgcccagtggtatgatgcgaatgtgtcgctcccaggttgcgataagaatatgccaggtgtgttaatggcaatgggacgcacgaatcggcctagtatcatggtctatggcggcagtatcaaacccggatgcagtgcaaagggccaaaagttagacctggtcagtgcattccagtcatatggacagttcatcaccggccagatcgatgagaaggaacggtttgatataattcgcaatgcatgccccggcagaggtgcctgcggtggcatgtacacagctaatacgctggccacagccattgagactatgggtatgaccgttcccggtagcagtagttgcccggcagacgatcctaagaagcttgttgagtgcgaaaacatcggggaggtggttaagactatgctcagggaagatatcaagcccagggatgtcttgacacgtcaagcttttgagaatgcaatgattgtggtgaacgtgctgggtggcagcactaatgctgttctacatctgattgctattgctgactctgttggtatcaagttgactattgatgacttccagacagtgtctgacaagacaccattcctagctgatttgaagccatctggaaaataccttatgaatgacctatacaacatcggtggcacaccagccctccttaaatatctcctaaaggagggcttgatcgatggctcaggaattactgtcactggcaaaacaatgaaggagaatgtagcctcatggcctgacttccctgctaaccaggatatcattcgccccctcagcaaccctattaaaccatctggtcatctccagattcttcgcggatcgctggccccgggcggttctgttgggaagattactggaaaggagggtctgcggtttgagggcacagctaagtgctatgactacgaagatgcattcattgagtcccttgagcggggcgagatcaagaagggcgacaaaacagtcgtgattattcggtatgaaggtcccaagggtggcccaggaatgcctgagatgctcaagcccagcgcggccattatgggtgctggtcttggccaggacgttgcacttctcacggacgggagattctcaggtggcagtcacggattcttgatcggacatattgtgccggaagccatggagggtggcccgatcgcgttagcacgagacggtgatcggatcgtgattgatgctgaggaaagagtggttgatctggatatcccgattgaagagctcgagaagaggaggaaggagtggaaagcacccccgctccgataccagaagggaactttgaagaagtattgcacgctggtcagcgatgccagccatggttgtgtcacagacggcccgatctag

SEQ ID NO: 70 - protein, 624 aa, Neosartorya fischeri
MFASSIRSRALGLSPRARFENTYERTFPRIASLSLLKNRQILITIVTSRLPSSTTERRYKSDETLNRISSKITQPKSQGASQAMLYATGLTEEDMSKPQVGISSVWFEGNPCNMHLHDLSAIVRDSVLRAGLVPMRFNSVGVSDGISMGTKGMRYSLQSRELIADGIETVMNAQWYDANVSLPGCDKNMPGVLMAMGRTNRPSIMVYGGSIKPGCSAKGQKLDLVSAFQSYGQFITGQIDEKERFDIIRNACPGRGACGGMYTANTLATAIETMGMTVPGSSSCPADDPKKLVECENIGEVVKTMLREDIKPRDVLTRQAFENAMIVVNVLGGSTNAVLHLIAIADSVGIKLTIDDFQTVSDKTPFLADLKPSGKYLMNDLYNIGGTPALLKYLLKEGLIDGSGITVTGKTMKENVASWPDFPANQDIIRPLSNPIKPSGHLQILRGSLAPGGSVGKITGKEGLRFEGTAKCYDYEDAFIESLERGEIKKGDKTVVIIRYEGPKGGPGMPEMLKPSAAIMGAGLGQDVALLTDGRFSGGSHGFLIGHIVPEAMEGGPIALARDGDRIVIDAEERVVDLDIPIEELEKRRKEWKAPPLRYQKGTLKKYCTLVSDASHGCVTDGPI

SEQ ID NO: 71 - DNA, 1626 bp, Neosartorya fischeri
atgctgtatgcgactggtttggaggaagcggatatgaacaaggcccaggtgggaatctcctcggtgtggtttgagggaaacccttgcaacatgcacctgatggacttgtccttggtggtacgcgactcggtcgccagggccggcctggttccaatgcgttttaactcgattggcgtttccgacggaatcagcatgggcacgagcggtatgcgatacagtctgcagagtcgtgagatcatcgcggacggcattgagacggtcatgaacgggcagtggtatgacgcgaatatctcacttccaggatgcgataagaacatgcccggtgttgttatggccatgggccgggtcaaccgtccgagcattgtgatctatggtggtagtattaagcctggttgcagcgctggtggccagactttggatctggtgagcgcctttcagtcatatggccaatacattactggtcagatagatgaagcacagcgctttgacatcattcgccatgcgtgcccgggaagtggtgcgtgtggtggcatgtatacagcgaataccatggccacagctattgaagttctcgggctcacggttccaggcagtagtagctgccccgcagaagatccgcgcaagaaagctgaatgtgaagagattggagaaacagtcaagaacctcttgaaggaagatatccggccttcggatattttgacccgccaagcatttgagaacgcaatgatcgtggtcaatattttgggaggtagcaccaatgcagtcatgcatttgattgccattgcccaatctgtgggaattaagctcaccattgatgatttccaagctgtgtctgacaagacgccatttctggccgacctaaaaccatcaggaaagtatgtcatgcatgacctgtacaagatcggcggcacaccggccctactccggttcctgctcaaggagggcttgattgacgggtctggtattactgtgaccggcaaaacaatgaaggagaatgttgcatcttggcctgatttccctgaagatcagcccattatccggccactgagcgatcccatcaagcccacgggtcaccttcaaattctgcgaggatccttggcacctggaggctccgttggtaagatcaccggtaaagagggtctccgatttgaaggcagtgccaagtgctacgactatgaagatgcctttgtggatgctcttgaaaagggagaaattaagaagggtgaaaagacagttgttattatccgatacgaggggccaaagggtggtccaggtatgccggaaatgctcaagcctagtgccgccatcatgggtgccggactgggtcaggatgtcgccctccttaccgacggtcgattttctggtggcagtcatggattcctaatcggtcatattgttcctgaggcaatggatggtggtccaatcgccctggtcaaagatggggacagggtgattatcgacgcagagaagagggtggttgatctggatatatccggagaagagatgcagaggaggaagaaggcatggaaagcgcctgaacctcgggcaaagaaaggcactctaaagaagtatgcagctcttgtcagtgacgctagccatggctgtgtcactgatgggccactttga

SEQ ID NO: 72 - protein, 541 aa, Neosartorya fischeri
MLYATGLEEADMNKAQVGISSVWFEGNPCNMHLMDLSLVVRDSVARAGLVPMRFNSIGVSDGISMGTSGMRYSLQSREIIADGIETVMNGQWYDANISLPGCDKNMPGVVMAMGRVNRPSIVIYGGSIKPGCSAGGQTLDLVSAFQSYGQYITGQIDEAQRFDIIRHACPGSGACGGMYTANTMATAIEVLGLTVPGSSSCPAEDPRKKAECEEIGETVKNLLKEDIRPSDILTRQAFENAMIVVNILGGSTNAVMHLIAIAQSVGIKLTIDDFQAVSDKTPFLADLKPSGKYVMHDLYKIGGTPALLRFLLKEGLIDGSGITVTGKTMKENVASWPDFPEDQPIIRPLSDPIKPTGHLQILRGSLAPGGSVGKITGKEGLRFEGSAKCYDYEDAFVDALEKGEIKKGEKTVVIIRYEGPKGGPGMPEMLKPSAAIMGAGLGQDVALLTDGRFSGGSHGFLIGHIVPEAMDGGPIALVKDGDRVIIDAEKRVVDLDISGEEMQRRKKAWKAPEPRAKKGTLKKYAALVSDASHGCVTDGPL

SEQ ID NO: 73 - DNA, 1845 bp, Aspergillus niger
atgccttttctgcggtggcctccaggccagaaaatcatgatcacacctaccactcctttccgagctgccagaactctggcattcggtggacggatactatcgcccaaaaagtcatcctctcgtcttctctcctcaactgcacatagttatgccgacgaaacactgaacaaagtctcctctaagatcacacaacccaagtcccagggtgcatctcaagcgatgctttacgcgaccggcttgacggagaaagacatgtccaaggcacaggttggaatttcatcagtgtggttcgaagggaatccttgtaacatgcacttgatggatttgtcgtcgctggttcgcgagtcggtagccaaagctggcctggttcccatgcgtttcaactccatcggcgcctctgatggcattagtatgggcacatctggcatgcgattcagtttacagagccgagagatcattgctgatggaattgaaacggtcatgaatgcccagtggtatgatgctaatatctcgttgcctggctgtgataagaacatgccaggtgtgctgatggctatgggtcgggtcaaccgtccgagtatcatggtgtatggtggtagtatcaagcccggctgcagtgcggggggtaagccacttgacttggtcagcgcctttcaatcgtatggccaatatctcactggtgagatcgacgagaaggaacgatttgatattatccgacacgcttgcccaggtgctggtgcctgtgggggtatgtatacggctaatacactggcaacggccatcgagaccctcggaatgacggtccctggaagcagcagtacaccggcagaggatccgaggaagctggcagagtgtgaggacatcggtcagacggtgaagaatctgctgaaggaggacatccgtcccaaggatatcatgacacggcaggcatttgaaaatgctatgattgttgtgaatattcttggaggcagcaccaatgcagtgctgcacttgattgctatcgctaattccgttgggatcaaattgactatcgatgacttccaggctgtgtcagacaagacacctttcttagctgatctaaagccttccggcaagtatgtcatgcatgacctgtacaaagtcgggggcacgcctgcactgctgaagttcctgctcagggaaggccttattgacggctccggcgtcactgttactggcaaaaccatgaaagagaatgtagcctcatggcccgaattttcacctgagcagcccatcatccgccctctaagcaatcccatcaagccaaccggccacttgcagatccttcgtgggtcattggcccccggcggctcggttggaaaaatcaccggcaaagaaggtctacggttcgaaggtcttgctaaatgttacgactttgaggacgctttcattgaggctctcgaacgaggcgagatcaagaagggcgagaaaacggtcgttattattcgatatgaagggcccaaaggcggccccgggatgcctgagatgctcaagcccagctcagctatcatgggcgcgggattgggtcaggatgttgcgctactcactgatggaagattctctggaggtagtcatggctttttaattgggcatgttgtgcctgaggctatggagggtgggcccattgccctggtgaaggatggcgatcggatcgtaattgatgcggagcaaagagtggttgacctgctgatcaccccagaagaaatggcaaagagaagagtgtcttggacagcaccggcacctcgggcgaagaaggggacattaagcaagtatgcgaagctggtgagcgatgcgagccatgggtgcgtgacggatggtccaatatag

SEQ ID NO: 74 - protein, 613 aa, Aspergillus niger
MPFLRWPPGQKIMITPTTPFRAARTLAFGGRILSPKKSSSRLLSSTAHSYADETLNKVSSKITQPKSQGASQAMLYATGLTEKDMSKAQVGISSVWFEGNPCNMHLMDLSSLVRESVAKAGLVPMRFNSIGASDGISMGTSGMRFSLQSREIIADGIETVMNAQWYDANISLPGCDKNMPGVLMAMGRVNRPSIMVYGGSIKPGCSAGGKPLDLVSAFQSYGQYLTGEIDEKERFDIIRHACPGAGACGGMYTANTLATAIETLGMTVPGSSSTPAEDPRKLAECEDIGQTVKNLLKEDIRPKDIMTRQAFENAMIVVNILGGSTNAVLHLIAIANSVGIKLTIDDFQAVSDKTPFLADLKPSGKYVMHDLYKVGGTPALLKFLLREGLIDGSGVTVTGKTMKENVASWPEFSPEQPIIRPLSNPIKPTGHLQILRGSLAPGGSVGKITGKEGLRFEGLAKCYDFEDAFIEALERGEIKKGEKTVVIIRYEGPKGGPGMPEMLKPSSAIMGAGLGQDVALLTDGRFSGGSHGFLIGHVVPEAMEGGPIALVKDGDRIVIDAEQRVVDLLITPEEMAKRRVSWTAPAPRAKKGTLSKYAKLVSDASHGCVTDGP

SEQ ID NO: 75 - DNA, 1848 bp, Aspergillus niger
atgcttctttcccaaacccgggggcgtatgccctccgctctccggagcatcgccaagcgctctttgctgaacagtcgccctctgtctaccactctgcccaagcaacagaacggcaacgatgacgagtatactggtctcaacaaggtctcccgccacattacccagcccatctcccagggtgcttcccaggccatgctgtatgccgcaggcctcactgaggcggacatgaacaaggctcaggtcggcatttcttctgtctggtacaatggcaacccctgcaacatgcatctgctcgatcttaacaaccgtgtccgcgagggtgtccagaaggccggtttggtcggtttccagttcaacaccgtcggtgttagcgatgctatcagtatgggtaccaagggaatgcgattctctctccagagtcgtgatctgattgccgactctatcgagaccgttatgggtggtcaatggtatgacgctaacatcagcattcccggctgtgacaagaacatgcctggtgtgttgatggcaatgggacgagtgaaccgccccagtttgatggtctacggtggaaccatcaagcctggttgcgcctccatgcagggcaacgccgacattgatatcgtctccgccttccaggcctatggtcagttcatcagtaaggaaatcaccgagccccagagatttgacattatccgcaacgcctgccctggaggtggtgcttgcggtggtatgtacactgccaataccatggccactgctatcgaagtcatgggcatgacccttcctggatcctcttccaaccccgccgagtctgacgctaagtaccttgaatgtcttgcggctggtgaggccatcaagaccctgctcaaggaggacattcgtccttcggacatcctgactcgccaagctttcgagaacgccatggtcttggtcaacatcactggtggctccaccaacgccgttcttcacttgattgccattgcggactctgttggtatcaagctcgacattgaagacttccagtccgtctcggatcgcattcctttcctggcggaccttaagccttccggcaagtacgtcatggctgaccttcacaagatcggtggtaccccctccctgctcaagttcttgctgaaggaaggtctcatcgatggctctggcatgactgtcactggtcagaccctggccaagaacttggagaatgtgccggacttccctgaggatcagaagatcatccgtcccctgtccaaccccatcaaggagactggccacatccagatcttgaggggttctctggccccgggtggcagtgtcggcaagatcactggtaaggaaggaaccgtcttcactggaaaggctcgcgtctttgacgacgaggatgatttcattgctgctctcgagcgcaacgagatcaagaaggaggagaagactgttgttgtcatccgctacactggtcctaagggaggacctggcatgcccgaaatgctgaagccctcttccgccctgatgggtgccggtctcggacagtcctgcgctctgatcaccgatggccgtttctctggtggttctcacggtttcttgatcggacacattgttcccgaagccgccgtcggtggccccattggcttggttaaggatggtgatgtcatcaccattgacgccgagaagcgtgttctggaccttgatgttgaggagaccgagctcgcgcaaagaagaaagcagtgggaagccgacagggctgctggcaagctccctcccaccggcctgaccctgagaggtactctcggcaagtacgctagaaccgtcaaggatgccagccacggctgtatcaccgactctctcgaataa

SEQ ID NO: 76 - protein, 615 aa, Aspergillus niger
MLLSQTRGRMPSALRSIAKRSLLNSRPLSTTLPKQQNGNDDEYTGLNKVSRHITQPISQGASQAMLYAAGLTEADMNKAQVGISSVWYNGNPCNMHLLDLNNRVREGVQKAGLVGFQFNTVGVSDAISMGTKGMRFSLQSRDLIADSIETVMGGQWYDANISIPGCDKNMPGVLMAMGRVNRPSLMVYGGTIKPGCASMQGNADIDIVSAFQAYGQFISKEITEPQRFDIIRNACPGGGACGGMYTANTMATAIEVMGMTLPGSSSNPAESDAKYLECLAAGEAIKTLLKEDIRPSDILTRQAFENAMVLVNITGGSTNAVLHLIAIADSVGIKLDIEDFQSVSDRIPFLADLKPSGKYVMADLHKIGGTPSLLKFLLKEGLIDGSGMTVTGQTLAKNLENVPDFPEDQKIIRPLSNPIKETGHIQILRGSLAPGGSVGKITGKEGTVFTGKARVFDDEDDFIAALERNEIKKEEKTVVVIRYTGPKGGPGMPEMLKPSSALMGAGLGQSCALITDGRFSGGSHGFLIGHIVPEAAVGGPIGLVKDGDVITIDAEKRVLDLDVEETELAQRRKQWEADRAAGKLPPTGLTLRGTLGKYARTVKDASHGCITDSLE

SEQ ID NO: 77 - DNA, 1833 bp, Aspergillus terreus
atgcttctctctcagacccggggccgtctgccctccctgcggaccctcaagcggtccatggcggtccgtccgctctctaccaccctccccaagcacaaggccgatgagaaagagcctgtcctcaacaaagtctcccgccatgtcacccaacccatctcccagggtgcgtcccaggccatgctctacgccaccggtctcaccgaggccgacatgaacaaggcccaggtcggtatctcctccgtctggtacaatggcaacccctgcaacatgcacctcctcgacctcaacaaccgtgtgcgggagggtgtccagaaggctggcctggtcgggttccagttcaacaccgtcggagtcagcgacgcgatcagcatgggtacctccggtatgcgcttctcgctgcagagccgtgatctcattgccgactccattgagactgtcatgggtggtcagtggtacgacgccaacatcagtatccctggttgcgacaagaacatgcccggtgtcctgatggccatgggcagagtcaaccgtcccagtctgatggtttacggtggttccattaagcccggctgcgcttcgatgcagaacaacgccgatatcgatatcgtctccgccttccaggcgtacggtcagttcatcagcggagagatcaccgagccccagcgtttcgacatcatccgcaacgcctgccccggaggtggcgcgtgcggtggtatgtacaccgccaacaccatggccaccgccatcgaggtcatgggtatgacccttcctggttcctcctccaaccccgccgagtcggcggccaagaacatcgagtgtctggcggccggtgaggccatcaagaagcttctggtggaagacatccgtccctccgatatcctgactcgccaggccttcgagaatgccatgattgttgtgaacattaccggtggttcgaccaatgcggtgctgcaccttatcgccattgccgattcggtcggcatcaagctagatattgaggacttccagaaggtctcggaccgtgtgccgttcctggctgacctcaagccttccggcaagtacgtcatggcggacctgcacaagatcggtggtactccttctctgctcaagttcctgcttaaggagggcctgatcgatggctctggtatgaccgtcaccggtcagaccctggccaagaacctggagaacgtgccggacttccccgaggaccagaagatcatccgtcctctgtctaaccccatcaaggagaccggtcacatccagattctccgtggctctctggcccctggcggtagtgtcggtaagatcactggtaaggagggtaccgttttcaccggtaaggctcgcgtcttcgaccacgaggacgacttcatcgctgcgctcgagcgcaaggagatcaagaaggaggagaagacggtcgttgtcatccgttatactggacccaagggtggtccgggtatgcctgaaatgctgaagccttcttctgccctcatgggcgccggtctgggcggctcctgcgctctgatcaccgacggacgtttctccggcggctctcacggattcctgatcggacatatcgtccccgaggctgctgtcggtggaccgattggtctggttaaggacggcgatgtgatcaccatcgacgccgtcaagcgtgtgctggatctggacgttgacgagaccactctggccgagagaagaaagcagtgggaggccgacaaggaggctggccgtctccctcctaccggtctgactctgcgtggtaccctgggcaagtatgctagaaatgtcaaggatgccagccacggctgcatcaccgatgctcttgactaa

SEQ ID NO: 78 - protein, 610 aa, Aspergillus terreus
MLLSQTRGRLPSLRTLKRSMAVRPLSTTLPKHKADEKEPVLNKVSRHVTQPISQGASQAMLYATGLTEADMNKAQVGISSVWYNGNPCNMHLLDLNNRVREGVQKAGLVGFQFNTVGVSDAISMGTSGMRFSLQSRDLIADSIETVMGGQWYDANISIPGCDKNMPGVLMAMGRVNRPSLMVYGGSIKPGCASMQNNADIDIVSAFQAYGQFISGEITEPQRFDIIRNACPGGGACGGMYTANTMATAIEVMGMTLPGSSSNPAESAAKNIECLAAGEAIKKLLVEDIRPSDILTRQAFENAMIVVNITGGSTNAVLHLIAIADSVGIKLDIEDFQKVSDRVPFLADLKPSGKYVMADLHKIGGTPSLLKFLLKEGLIDGSGMTVTGQTLAKNLENVPDFPEDQKIIRPLSNPIKETGHIQILRGSLAPGGSVGKITGKEGTVFTGKARVFDHEDDFIAALERKEIKKEEKTVVVIRYTGPKGGPGMPEMLKPSSALMGAGLGGSCALITDGRFSGGSHGFLIGHIVPEAAVGGPIGLVKDGDVITIDAVKRVLDLDVDETTLAERRKQWEADKEAGRLPPTGLTLRGTLGKYARNVKDASHGCITDALD

SEQ ID NO: 79 - DNA, 1824 bp, Aspergillus clavatus
atgcttctctctcagacccggggccgtgtgccctctgttctccggagcttctcccgccgctccctctctaccaccatccccagatacaccgccgataaggatgactctgctctcaacaaggtgtcccgcaatgtcacacagcccatctcgcagggtgcctcccaggccatgctgtacgccacgggtcttaccgaggcggacatgaacaaggctcaggtcggtatctcgtcggtctggtacaatggcaacccctgcaacatgcatctgctcgatctcagcaaccgcgttcgcgaaggagtccagaaggctggtctggttggcttccagttcaacacggtcggtgtcagtgatgccatcagcatgggcaccaagggcatgcgcttctccctgcagagccgtgacctgattgccgactccatcgagaccgtcatgggtggtcagtggtacgacgccaacatcagtatccccggttgcgacaagaacatgcccggtgtgctcatggccatgggccgtgtcaaccgccccagtttgatggtgtatggtggtaccatcaagcccggctgcgccaaaacccagaacaacgccgacatcgacattgtctcggccttccaggcgtacggacagttcctgactggcgagatcaccgagccccagcgcttcgacatcatccgtaacgcctgccccggcggtggtgcttgcggtggtatgtacactgccaacaccatggccaccgccatcgaggtcatgggtatgaccctgcctggctcgtcgtccaaccccgctgagtctaaggccaaggaccttgagtgcttggctgctggtgaggccatcaagcgcctgctgaaggaggatatccgtccctcagacatcctgacccgccaggccttcgagaacgccatgattgtggtcaacatcaccggtggctccaccaacgccgtacttcacttgatcgccattgccgactccgtcggcatcaagctggacatcgaggagttccagaaggtctcggaccgcacccccttcctggcggacctcaagccctccggcaagtacgtcatggccgatctgtacgacatcggcggaactcctgctctgctcaagttcctgctcaaggagggcgtcatcgacggctccggcatgaccgtcaccggtgagaccctggccaagaacttggagaaggtgcccggcttccccgaggaccagaagatcatccgtcctttttcgaaccccatcaagaagactggccacattcagatcctgcgcggctccctggcccccggcggcagtgttggcaagatcaccggtaaggagggtacccgcttcgttggcaaggcccgcgtcttcgaccacgaggacgacttcattgccgctctcgagcgcaacgaaatcaagaaggaggacaagaccgttgtcgtcatccgctacaccggccctaagggtgggcccggcatgcctgaaatgctcaagccctcctccgccctgatgggcgccggcctcggctcctcctgcgcactcatcaccgacggtcgtttctccggcggctcccacggcttcctgattggccacatcgtccccgaggccgccgtcggcggccccatcggcctcgtccaggacggcgacatcatcaccatcgacgccgagaagcgcatcctcgacctcgacgtccccgagcccgagctcgcccagcgcagaaaggattgggaggccgccaaggccgccggcaagttgccccagaccggtctcaccatgagaggtaccctgggcaaatatgccagaaccgtcaaggatgccagccacggctgcattactgattatatagaataa

SEQ ID NO: 80 - protein, 607 aa, Aspergillus clavatus
MLLSQTRGRVPSVLRSFSRRSLSTTIPRYTADKDDSALNKVSRNVTQPISQGASQAMLYATGLTEADMNKAQVGISSVWYNGNPCNMHLLDLSNRVREGVQKAGLVGFQFNTVGVSDAISMGTKGMRFSLQSRDLIADSIETVMGGQWYDANISIPGCDKNMPGVLMAMGRVNRPSLMVYGGTIKPGCAKTQNNADIDIVSAFQAYGQFLTGEITEPQRFDIIRNACPGGGACGGMYTANTMATAIEVMGMTLPGSSSNPAESKAKDLECLAAGEAIKRLLKEDIRPSDILTRQAFENAMIVVNITGGSTNAVLHLIAIADSVGIKLDIEEFQKVSDRTPFLADLKPSGKYVMADLYDIGGTPALLKFLLKEGVIDGSGMTVTGETLAKNLEKVPGFPEDQKIIRPFSNPIKKTGHIQILRGSLAPGGSVGKITGKEGTRFVGKARVFDHEDDFIAALERNEIKKEDKTVVVIRYTGPKGGPGMPEMLKPSSALMGAGLGSSCALITDGRFSGGSHGFLIGHIVPEAAVGGPIGLVQDGDIITIDAEKRILDLDVPEPELAQRRKDWEAAKAAGKLPQTGLTMRGTLGKYARTVKDASHGCITDYIE

SEQ ID NO: 81 - DNA, 1842 bp, Aspergillus nidulans
atgcttctttcacagactcggggccgcctgccctctgctctccgcagcttggccaacagagctgctattcgtccaatctctactacactcccccgccaaaaagcgtcgccaaaagatgatgagcccgtcctcaacaaggtctcccgccatatcacacagccggtgtcccagggtgcttcccaggcgatgctgtacgctacgggtcttactgaggccgacatgaacaaggcccaggttggtatttcctcggtctggtacaacggcaacccttgcaacatgcacctcctcgacctgaacaaccgtgtccgcgagggtgtgcaaaaggctggccttatcgggtaccagttcaacaccattggtgtcagtgatggaatcagtatgggtaccagtggtatgcgttactcgcttcagagccgtgacctcatcgccgactctatcgagaccgtcatgggtggtcagtggtacgacgccaacatcagcatccccggttgcgacaagaacatgcccggtgttttgatggctatgggacgagtcaaccgccccagtttgatggtttacggtggaaccatcaagcccggctgcgcatccatgcagggcaacgctgacatcgatatcgtctctgccttccaagcctacggccagttcatcagcggtgagatcaacgagccccagcgcttcgatatcatccgccacgcctgccccggtggcggcgcttgcggtggaatgtacactgccaacaccatggccacggccatcgaagtcatgggtatgaccctcacgggctcctcgtccaacccggccgaatcgcaagccaaatacgacgaatgtcttcgcgctggtgaagccatcaagcgcctcctcgtcgaagacatccgcccctccgacatcatgactcggcaagccttcgagaacgccatggtcgttgtcaacatcaccggcggctccaccaatgctgtccttcacctcatcgccattgccgactccgtcggcatcaagctcacaattgacgacttccaagccgtctctgaccgcacccccttcctcgcagacctcaagccatccggcaaatacgttatggccgacctccacaacatcggcggcaccccctccctcctcaaattcctcctcaaggaaggcgtcattgatggctccggcatcacagttaccggtgaaactctcgccaagaacctcgagaaagtccccgatttccccgaggaccagaaaatcattcgccccttctccaaccccatcaaggaaacaggccacatccagatcctgcgcggttcgctcgcgccgggcggttgcgttggtaagattaccggtaaggagggaaccgttttcacgggcaaggcccgcgtctttaaccacgaagacgacttcattgccgccctggagcgcaaggaaatcaccaaggatgagcaaactgtcgttgtgattcgctacaccggtcccaagggtggtcccggtatgcctgaaatgctcaagccttcaagcgccctcatgggtgctggcctcggccaaacctgcgccctgatcacagacggacgcttctccggtggttcgcacggcttccttattggacacatcgtcccagaggctgccgtcggtgggccgattggtctcgtacacgacggcgacgtgatcaccattgatgccgagaagcgcgttttggaccttgacgttgacgaggcggaactcgctaagcgacggaagcagtgggaggctgataaggcggcgggcaagttgccccagaccgggttgaacttgcgcgggacgcttggaaagtatgcccggaatgtcaaggatgctagttccgggtgtattacggacgctttcgattaa

SEQ ID NO: 82 - protein, 613 aa, Aspergillus nidulans
MLLSQTRGRLPSALRSLANRAAIRPISTTLPRQKASPKDDEPVLNKVSRHITQPVSQGASQAMLYATGLTEADMNKAQVGISSVWYNGNPCNMHLLDLNNRVREGVQKAGLIGYQFNTIGVSDGISMGTSGMRYSLQSRDLIADSIETVMGGQWYDANISIPGCDKNMPGVLMAMGRVNRPSLMVYGGTIKPGCASMQGNADIDIVSAFQAYGQFISGEINEPQRFDIIRHACPGGGACGGMYTANTMATAIEVMGMTLTGSSSNPAESQAKYDECLRAGEAIKRLLVEDIRPSDIMTRQAFENAMVVVNITGGSTNAVLHLIAIADSVGIKLTIDDFQAVSDRTPFLADLKPSGKYVMADLHNIGGTPSLLKFLLKEGVIDGSGITVTGETLAKNLEKVPDFPEDQKIIRPFSNPIKETGHIQILRGSLAPGGCVGKITGKEGTVFTGKARVFNHEDDFIAALERKEITKDEQTVVVIRYTGPKGGPGMPEMLKPSSALMGAGLGQTCALITDGRFSGGSHGFLIGHIVPEAAVGGPIGLVHDGDVITIDAEKRVLDLDVDEAELAKRRKQWEADKAAGKLPQTGLNLRGTLGKYARNVKDASSGCITDAFD

SEQ ID NO: 83 - DNA, 1848 bp, Aspergillus oryzae
atgcttctttcacaaacccgggggcgtatgccctctgctctgcggagcctctccaggcggtccgccgtcaatgttcgtcccctctctaccaccctccccaagcaaaaggcctcttcctccgaagacgacaacgctctgaacaaggtctcccgccatgtcacacagcccatctcgcagggtgcttcccaggccatgctttacgctaccggtctcaccgaggaggacatgaacaaagctcaagtcggtatctcctccgtttggtatagcggtaacccctgtaacatgcatctgctcgatctcaaccaccgcgtcaagcaaggtgtggaacaggcaggcttgatcggcatgcagttcaacaccgtcggtgtcagtgatgcaatcagtatgggtacgaagggtatgcgatattctcttcagagtcgtgatctgattgccgactctatcgagactgttatgggtggtcagtggtacgatgccaacatcagtatcccgggttgcgacaaaaacatgcccggtgtgttgatggccatgggcagagtcaaccggccgagcattatgttgtacggaggcaccatcaagcccggttgtgccgctacccaaaacaatgccgagattgacatcgtctccgcattccaggcctacgggcagttcctgagcggcgacattaccgagcctcagcgatttgatattatccgtaacgcttgcccaggaggcggtgcctgcggtggtatgtacacggccaacaccatggccaccgccattgagaccattggtatgaccctccctggctcttcttccaaccccgccgagtcccgcgccaaggaccttgagtgtctggctgttggtggggcgatcaagaagcttctgaaggaggacatccgccctagggatattatgacccgccaagctttcgaaaacgccatggttgtggtgaacatcaccggtggctcgaccaacgctgtgctgcacttgattgccatcgctgattcggtcggcatcaagctggatattgaggacttccagtccgtctccgaccgtattcctttcttggctgatctgaagccatcgggcaagtacgtcatggccgacatgcacaagatcggaggtacccccgcactgctcaagttcctgctcaaggaaggcctcatcgatggttccggcatgactgtcaccggtgagactctagccaagaacctcgagaaggttcccgatttccccgaagatcagaagatcatccgccctctgtccaaccccatcaaggagactggccatatccagattctgaagggatccctggctccgggtggcagtgttggtaagatcactggcaaggagggtacttctttcactggtaaggcacgtgtcttcgatgatgaggatgatttcatcgctgctctggagcgtggtgagatcaaaaaggaggacaagactgttgtggttatccgctacaccgggcccaaggggggtcctggtatgcccgaaatgttgaagccctcttctgcccttatgggctatggtctcggacagtcggttgccctcatcaccgatggacgtttctccggcggctctcatggcttcctgatcggacacattgtccctgaggctgctgttggtggacctattggtctcgtcaaggatggtgatgtcatcgtcattgatgctgagaagcgcgttctcgaccttgaggttgaccaggagactctcgccgagagacgcaagcagtgggaagccgataaggaggccggcaagctgcctcccaccggtctgactatgagaggaaccctcggcaagtacgctaggaccgtcaaggatgccagccacggctgtatcaccgatgctcttgattaa

SEQ ID NO: 84 - protein, 615 aa, Aspergillus oryzae
MLLSQTRGRMPSALRSLSRRSAVNVRPLSTTLPKQKASSSEDDNALNKVSRHVTQPISQGASQAMLYATGLTEEDMNKAQVGISSVWYSGNPCNMHLLDLNHRVKQGVEQAGLIGMQFNTVGVSDAISMGTKGMRYSLQSRDLIADSIETVMGGQWYDANISIPGCDKNMPGVLMAMGRVNRPSIMLYGGTIKPGCAATQNNAEIDIVSAFQAYGQFLSGDITEPQRFDIIRNACPGGGACGGMYTANTMATAIETIGMTLPGSSSNPAESRAKDLECLAVGGAIKKLLKEDIRPRDIMTRQAFENAMVVVNITGGSTNAVLHLIAIADSVGIKLDIEDFQSVSDRIPFLADLKPSGKYVMADMHKIGGTPALLKFLLKEGLIDGSGMTVTGETLAKNLEKVPDFPEDQKIIRPLSNPIKETGHIQILKGSLAPGGSVGKITGKEGTSFTGKARVFDDEDDFIAALERGEIKKEDKTVVVIRYTGPKGGPGMPEMLKPSSALMGYGLGQSVALITDGRFSGGSHGFLIGHIVPEAAVGGPIGLVKDGDVIVIDAEKRVLDLEVDQETLAERRKQWEADKEAGKLPPTGLTMRGTLGKYARTVKDASHGCITDALD

SEQ ID NO: 85 - DNA, 1836 bp, Ajellomyces capsulatus
atgctccgattacaagcacggggccggatgcccaactgcttcaaaagactgcttttcccattgtcctgtcgagctctctccgcaactccatacccatattcatcttcgtcctcacaggagaagaagctcaacagtgtttcccaacatgtaacgcaacccatttcccaaggtgcctcacaggccatgctttacgctacgggcctaatgccggaggatatgtcgaaagctcaagttggcatctctagcgtctggtacaacggaaacccctgcaacatgcatctcctcgatctcagcaaccgtgtgcgcgaaggtgtgcaaaaggcgggactcataggttaccagttcaacactgttggcgtcagtgacgctatcagcatgggtacgtcaggtatgcggtacagtttgcagagtcgggatctcatcgcggactcgattgagacggtcatgggtggtcaatggtatgatgctaacatcagcatccccgggtgtgacaagaatatgcctggcgtggttatggcaatgggaagagtaaaccggccaagtttgatggtttatggcggaacaattaagcccgggtgcgcggtaacccaaaacaacgccgatatcgacatcgtgtctgcgttccaggcttacggccaattcataactggtgagatcactgaggctcagcgatacgacatcatccgacatgcttgccctggcggtggtgcttgtggggggatgtacactgcaaacaccatggcgtctgcgatcgaagttatgggaatgacgttaccgggatcttcatcgaaccctgcagaatccaaagccaaggatctagaatgcctgacggctggggaagcaattaaaacccttctcaaggaggatatccgtcccactgacatcttgacgcgccaggcctttgaaaatgcaatggttcttgtcaacatcaccggcggctccaccaacgcagtgctccatctgatcgctatagctgactctgtcggaattaaactcacaattgacgatttccagtcagtcagtgaccgcatccccttcctcgcagatctcaagccttccggtaaatatgttatggccgatcttcatacaattggtggtactccctcattactcaagttcctcttgaaggagggtctcatcgacggctctggaattaccgtgactggtcaaaccctggccaagaacctcgagaaggttcctgaattcccttcagatcagaaaatcattcgacccctcaacaaccccatcaagaaaactgggcacatccagatcctccgcggaagcctcgcccctgaaggcagcgtcggcaaaattacaggaaaggagggtaccaagttcactggcaaggcgaaggtctacgatcatgaagacgattttattaccgcattagaacagaatgagatttcgaaggacgagaagacagtcgtggtaattcgttacactgggcccaagggtggtccgggaatgcctgaaatgctcaagccttcctccgcccttatgggcgcggggctaggttcatccgtcgccttgatcacagacggccgtttcagtggtggctctcatggcttcctgatcggccacatcgttcccgaagccgcagtcgggggccctattgcgctcgtccacgatggcgatgtcatcaccattgacgccgaaaaacgtttgctcgaccttgacgtctccgaacacatcctagctcagcgtaggaaggaatgggccgatagggagagtaaaggactaaatcccgttacgggaatgaaaatgagagggacgctgggaaaatatgctagatctgtcaaggacgcaagtcacggatgcatcaccgacgcattatag

SEQ ID NO: 86 - protein, 611 aa, Ajellomyces capsulatus
MLRLQARGRMPNCFKRLLFPLSCRALSATPYPYSSSSSQEKKLNSVSQHVTQPISQGASQAMLYATGLMPEDMSKAQVGISSVWYNGNPCNMHLLDLSNRVREGVQKAGLIGYQFNTVGVSDAISMGTSGMRYSLQSRDLIADSIETVMGGQWYDANISIPGCDKNMPGVVMAMGRVNRPSLMVYGGTIKPGCAVTQNNADIDIVSAFQAYGQFITGEITEAQRYDIIRHACPGGGACGGMYTANTMASAIEVMGMTLPGSSSNPAESKAKDLECLTAGEAIKTLLKEDIRPTDILTRQAFENAMVLVNITGGSTNAVLHLIAIADSVGIKLTIDDFQSVSDRIPFLADLKPSGKYVMADLHTIGGTPSLLKFLLKEGLIDGSGITVTGQTLAKNLEKVPEFPSDQKIIRPLNNPIKKTGHIQILRGSLAPEGSVGKITGKEGTKFTGKAKVYDHEDDFITALEQNEISKDEKTVVVIRYTGPKGGPGMPEMLKPSSALMGAGLGSSVALITDGRFSGGSHGFLIGHIVPEAAVGGPIALVHDGDVITIDAEKRLLDLDVSEHILAQRRKEWADRESKGLNPVTGMKMRGTLGKYARSVKDASHGCITDAL

SEQ ID NO: 87 - DNA, 1845 bp, Coccidioides immitis
atgcttcagctaaggcctcgcgggcatatgccctacaggcaattgctcacttatctctctcaccgtgccttttcttccagatcgacgttccagcagaagtcttcgtcgaatcccccgtcaaaatcaggaaagccattaaatgaagtatccagccatatcacgcagccaatctcccagggcgcttcccaggctatgctttacgctaccgggctttcgacggacgacatgtccaagcctcaggtcgggatctccagtgtctggtacaatgggaatccctgcaacatgcacctcctggacctaagcaacatcgtgcgggaaggcgtgcaaaaggcaggattgatcggatatcaattcaacaccattggtgttagtgacggaattagcatgggaacaaaaggaatgagatacagcttgcagagcagagacctaatcgccgattccatagagaccgtcatgggtggtcagtggtacgacgcaaatatcagtctgccgggatgcgataaaaacatgccgggagttatcatggctatgggtcgtgtgaaccggccgagtttgatggtatatgggggaacgatcaggccgggctgtgctgcaacacaaaacaatgctgatatcgatatcgtgtccgccttccaggcatacggccaattcttgactggggagatctccgaggagcagcgatttgatattatccgccatgcctgccctggtggtggtgcatgtggtggaatgtacaccgcaaacaccatggcttcggctatcgaggtcatgggaatgacccttccgggctcttcctccaacccagcagaatctaaggcaaagaaggccgaatgtctggctgcgggcgaagccatcaagaaccttctcatcgaggatattcgaccatccgacatcctcaccaggaccgcatttgaaaacgccatgatcttggtgaacatcactggaggctccaccaacgcggtcctccacctcattgccatggccgactccgtcggcatcaaactcaccattgatgacttccaggccgtcagcgatcgtaccccgttcctcgcagaccttaagccatccggaaagtacgtcatggctgatctgcacaacattggcggcaccccatccctgattaaattcctactgaaggagggtgtcctcgacggttcgggaatgactgttaccggtcagaccttggccaagaacgtagagaatgtccctgacttcccatctgaccaaaagatcatccgacctttcagcaacccaatcaagaagaccggccatcttcaaatcctccgtggcagcctcgctcctgaggggagtgtaggcaagatcacaggcaaagaaggaacaagtttcacaggcaaagctagagtgtatgacgatgaagatgattttattgcctctttggaacgaaacgaaattaaaaaggaagagaaaactgtcgttgttatccgatatactggaccgaagggaggaccaggaatgccagagatgcttaagccttcttctgccctgatgggtgccggattgggctcttctgttgccctcatcacggacgggcgtttcagtggtggttctcatggcttcttgatcggacacatcgtccctgaagccgcggttggcggaccaatcgccctcgttgaagacggcgacatcatcaccatcgacgccgagaagcgagttctcgatcttgaagtcggtgaagacgttctcgcgcaaagaaggaagaagtggcaggagaaacaggaggcaggcctcggtcgtccaactggattgacgatgaggggaactctgggtaaatatgccagagctgtgacggatgctagtcatggatgtatcaccgacggtgtatga

SEQ ID NO: 88 - protein, 614 aa, Coccidioides immitis
MLQLRPRGHMPYRQLLTYLSHRAFSSRSTFQQKSSSNPPSKSGKPLNEVSSHITQPISQGASQAMLYATGLSTDDMSKPQVGISSVWYNGNPCNMHLLDLSNIVREGVQKAGLIGYQFNTIGVSDGISMGTKGMRYSLQSRDLIADSIETVMGGQWYDANISLPGCDKNMPGVIMAMGRVNRPSLMVYGGTIRPGCAATQNNADIDIVSAFQAYGQFLTGEISEEQRFDIIRHACPGGGACGGMYTANTMASAIEVMGMTLPGSSSNPAESKAKKAECLAAGEAIKNLLIEDIRPSDILTRTAFENAMILVNITGGSTNAVLHLIAMADSVGIKLTIDDFQAVSDRTPFLADLKPSGKYVMADLHNIGGTPSLIKFLLKEGVLDGSGMTVTGQTLAKNVENVPDFPSDQKIIRPFSNPIKKTGHLQILRGSLAPEGSVGKITGKEGTSFTGKARVYDDEDDFIASLERNEIKKEEKTVVVIRYTGPKGGPGMPEMLKPSSALMGAGLGSSVALITDGRFSGGSHGFLIGHIVPEAAVGGPIALVEDGDIITIDAEKRVLDLEVGEDVLAQRRKKWQEKQEAGLGRPTGLTMRGTLGKYARAVTDASHGCITDGV

SEQ ID NO: 89 - DNA, 1830 bp, Botryotinia fuckeliana
atgctctcacaattgagaacgagggcaaatgcctctcttctcacctcaagaagagcttcacaatatgtgcgctctctatcgtccacatcctctctccgcacatcctccaatgactcagaaccacagctcaacagaacctcagctgctatcacacaaccaaaatcacaaggtgcttcgcaggcaatgttatatgccactggtatgaccgaggaaagattaaacaaagcacaagttggtatctcttcagtatggtggtcgggaaatccttgcaacatgcatcttttggaactcaaccacaaagtaaaggaaggagtagagagagccggtttggtaggatatcaattcaacaccattggagtttcggacggtatttctatgggtacaaagggtatgagatacagtcttcagtcaagagatttgattgcggatagtattgaaactgtgatgggtggtcaatggtatgatgccaacatttcgattcctggatgtgacaagaacatgcctggtgttatgatggcaattggcagagtcaacagaccagcccttatggtttatggtggttctattaaaccagggtgtgccgcaacacaaaacaacgcagatatcgatattgtctccgcattccaagcctacggacaattcattactggagagattacagaagaacaaagattcgatgttattcgtcatgcttgcccaggtcaaggtgcatgtggtggaatgtataccgcaaacaccatggcatcagctatcgaaattatgggaatgactcttcctggatcttctaccaaccccgcagattcaaaggccaaattacttgaatgctacgcagctggtggtgcaatcaaaactcttctcaaggaggacatcagacctagagatatcatgacaagacaggctttcgaaaatgctatggttcttgttaccattactggaggatctaccaacgctgttcttcatcttattgctatggcagatgctgtaggaatcaagctcacaatcgatgatttccaagctgtttctgaccgaacacctttcctcgcagacctcaaaccatctggtaaatacgtcttcaatgatctttacagcatcggtggtactccttctcttatcaaactcctcatcaaggaaggtgtcattgatggatcaggaatgactgttactggtaagacccttgctgagaacgtcaaggatgttcgtgatttcccatccgaccaagaaattattcgcccattctcaaaccccatcaaaaagtctggtcacattcaaattctccgcggttccctcgcaccaggtggatccgttggtaaaatcaccggtaaagaaggattacgattcgttggaaaagctaaggtttatgatgctgaaaatgatttcatcgaagcccttgagcgtggcgaaatcaagaagggagagaagaccgttgtagtcattcgttatgaaggaccaaagggtggaccaggtatgccagaaatgttaaaaccatcctcggcaatcatgggtgcaggacttggaaaggatgtcgctcttattaccgatggacgtttcagtggaggatctcatggattcttgattggacatattgtaccagaggcacaagtcggtggaccaattggattggttagggatggtgatactattgttattgatgctgagacgagagtattggatttggaagttgagggtggtgaggaggaattggagaggaggagaaaagaattcgtcgcacctcctttgaaatataccaagggtactttggcgaaatactcgagattggtacaagatgctagtcatggatgtattaccgatggagaaatcgttgaggcatga

SEQ ID NO: 90 - protein, 609 aa, Botryotinia fuckeliana
MLSQLRTRANASLLTSRRASQYVRSLSSTSSLRTSSNDSEPQLNRTSAAITQPKSQGASQAMLYATGMTEERLNKAQVGISSVWWSGNPCNMHLLELNHKVKEGVERAGLVGYQFNTIGVSDGISMGTKGMRYSLQSRDLIADSIETVMGGQWYDANISIPGCDKNMPGVMMAIGRVNRPALMVYGGSIKPGCAATQNNADIDIVSAFQAYGQFITGEITEEQRFDVIRHACPGQGACGGMYTANTMASAIEIMGMTLPGSSTNPADSKAKLLECYAAGGAIKTLLKEDIRPRDIMTRQAFENAMVLVTITGGSTNAVLHLIAMADAVGIKLTIDDFQAVSDRTPFLADLKPSGKYVFNDLYSIGGTPSLIKLLIKEGVIDGSGMTVTGKTLAENVKDVRDFPSDQEIIRPFSNPIKKSGHIQILRGSLAPGGSVGKITGKEGLRFVGKAKVYDAENDFIEALERGEIKKGEKTVVVIRYEGPKGGPGMPEMLKPSSAIMGAGLGKDVALITDGRFSGGSHGFLIGHIVPEAQVGGPIGLVRDGDTIVIDAETRVLDLEVEGGEEELERRRKEFVAPPLKYTKGTLAKYSRLVQDASHGCITDGEIVEA

SEQ ID NO: 91 - DNA, 1692 bp, Phaeosphaeria nodorum
atgtctctcgcacgctttggaggcgcactttcacgtcccaagtcgcagggcgcctcgcaggccatgctgtacgcgactggcatgagcgaggatgatatgaataaggcccaggtcggcatctcatcagtgtggtactcgggcaacccatgcaatatgcacctgatggacctcaacaacaaggtcaaagagggtgtgcagcgggctggtctcttgggcatgcagttcaacaccattggtgtgagtgacggcatttccatgggcaccaagggcatgcgctactcgctgcagtcgcgtgagatcatcgcagactcgattgagactgtcatgggcggccaatggtacgatgcgaacatttccatccccggatgcgacaagaacatgcccggtgtcatcatggctatgggccgtgtgaaccggccctcgctgatggtctacggcggaaccatccagcctggatgcgcaaagactctcgacaaccagtccatcgacatcgtctctgccttccaggcctacggacaattcataactggagagatcactgaagaccagcgcttcgatgtcatcagacacgcatgcaacggtcagggtgcttgtggaggcatgtacacggcaaacacaatggctactgccattgagaccatgggcatgtcgctgcccggctcatcgtcgaaccccgccaactcgcaggccaagatgctggaatgcctggctgcgggaggcgcaatcaagaacctgctcaaggaggacctgcgccccagcgacatcctcaccaggcaagcactcgagaacgccatggttgtcatcagcatcaccggaggctccaccaacgccgtattacacctgatcgccatcgccgactctgttggtctcaaactgaccatcgacgacttccagagcgtgagcgaccggattccgttgctcgctgatctcaagccctctggcaagtacgtcatggctgatgttcacgacatcgggggtactcccgcactgctcaagttcctgcttaaggagggcctgctcgacggcagccagatgactgtcactggcaagaccctaaagcagaacttggagaacgtcaaggacttcccctccgaccagaagatcatccgccctctcagcgagcccctcaagactaccggccatttgcaaattctccgtggtagtctcgcaccaggtggctgtgtcggcaagatcaccggcaaagaaggaaccatcttcaccggcaaagccaaatgctacgatgccgaagacgacttcatcagtgcgctcgagcgcggcgagatcaaaaagggcgagaagactgtcgtcgtcatccgctacgaaggccccaagggcgggcccggcatgcctgaaatgctcaagcccagctccgccatcatgggcgcaggtctcggcaaggatgtcgcactcatcactgacgggcgcttcagcggtggtagccacggtttcttgatcggccacattgtgcctgaagcgcaggagggcggaccgatcggtcttgtccaggatggcgatgagatcaccatcgactctgagtcgaatgaacttaacattggcgtgagcgagcaggagttggcggagcgcaggaagagctggaaggcgccggcgctgaagtatcaaaagggcacgctgttcaagtatgcgcggttcgtcaaggacgccagctcgggatgcgtgacggactcggcataa

SEQ ID NO: 92 - protein, 563 aa, Phaeosphaeria nodorum
MSLARFGGALSRPKSQGASQAMLYATGMSEDDMNKAQVGISSVWYSGNPCNMHLMDLNNKVKEGVQRAGLLGMQFNTIGVSDGISMGTKGMRYSLQSREIIADSIETVMGGQWYDANISIPGCDKNMPGVIMAMGRVNRPSLMVYGGTIQPGCAKTLDNQSIDIVSAFQAYGQFITGEITEDQRFDVIRHACNGQGACGGMYTANTMATAIETMGMSLPGSSSNPANSQAKMLECLAAGGAIKNLLKEDLRPSDILTRQALENAMVVISITGGSTNAVLHLIAIADSVGLKLTIDDFQSVSDRIPLLADLKPSGKYVMADVHDIGGTPALLKFLLKEGLLDGSQMTVTGKTLKQNLENVKDFPSDQKIIRPLSEPLKTTGHLQILRGSLAPGGCVGKITGKEGTIFTGKAKCYDAEDDFISALERGEIKKGEKTVVVIRYEGPKGGPGMPEMLKPSSAIMGAGLGKDVALITDGRFSGGSHGFLIGHIVPEAQEGGPIGLVQDGDEITIDSESNELNIGVSEQELAERRKSWKAPALKYQKGTLFKYARFVKDASSGCVTDSA

SEQ ID NO: 93 - DNA, 1797 bp, Schizosaccharomyces pombe
atgatgttctgcaagcttctccgttgtcaaaacggtattgctagcaaaagagctgcattaagcctaaaaggctttaaaacctcttcgatcaatttagtcgagaagaaattgaacaagtatagtgaaacaatcactggtccgaagtctcagggtgcttcccaagctatgttatatgctactggacttaatgaggaggacatgaaaaaaccccaagtcggcattgctagttgttggtatgaaggaaatccttgcaatatgcatttacttgatctcggtcgacgagtgaaagaaggtgtcaaaaaggctggattgaccggattccagtttaatactattggtgttagtgatggtatttctatgggtactactggtatgcgttatagtttgcaatctcgtgagattattgcagactccattgagaccgtcatgcaaggtcaatggtatgatgccaacgtctctattcctggctgtgacaaaaacatgcctggttgtttaatcgctatgggaagattcaaccgccctagtattatggtttacggcggtagtattcgtgctggtcactctccttgtcagaacaatgcacccatcgatattgtttctgcttttcaatcctatggtgaatttatcacaggaaaaattgatgagccaacccgtcatgacattattcgtcatgcatgtcctggaggtggtgcttgtggtggtatgtatactgcaaatacaatggctagctgtgccgaagctatgggtatgacattacccggttcttcttcttaccttgctggctcacctgagaagtttgcagaatgcgaagctgcaggtagtgctataaagcgacttttggttgacgacattaaacctcgcgacatcatgacacgttctgcttttgaaaatgctatggtcttgacgatgactcttggtggctctaccaactctgttcttcatttgatcgcaattgctaagtctgttggtatcactttaactttggatgatttccaagccgtcagtaaccgtacaccgtttattgccgatatgaagcctagcgggaagtacgttatggaagatttgttcgctatcggaggtattccttcagtacttaaatatctccatgctgaaggtctcatcgatggttctaatattaccgttactggtaaaactctcgctgagaacctacgaggattcaaggaccttgccgaaggtcaaaagatcattagacctttgagcaaccccatcaagaccgagggtcatttacgtgtcctccgtggttctttagcccctgaaggttctgtcgcaaagattactggcaaagagggcttgaacttcaccggcaaagctcgtgtttttgatgccgaaaacgattttattgctgccttagagcgtggtgagttcaagaagggcgagaagactgtcgtcattattcgttttgagggaccaaaaggtggacctggtatgccggaaatgttaaagccttcaagtgctattatgggagctggtcttggaaaggatgttgcacttttgactgacggtcgtttcagtggtggctctcacggatttttgattggacacgttgatcccgaagcacaagttggaggccctattgctcttgttcaggacggcgatgtcattgaaatcaatgctgtaaagaacactttagatttgatggttgatgagaaggagatggcgagacgccgcagtgtttggaaggcacctcctttgaagtaccaacaaggaacccttttaaaatatgctcgcaacgttagcactgcctccaagggtgctgttacagattccttagagtaa

SEQ ID NO: 94 - protein, 598 aa, Schizosaccharomyces pombe
MMFCKLLRCQNGIASKRAALSLKGFKTSSINLVEKKLNKYSETITGPKSQGASQAMLYATGLNEEDMKKPQVGIASCWYEGNPCNMHLLDLGRRVKEGVKKAGLTGFQFNTIGVSDGISMGTTGMRYSLQSREIIADSIETVMQGQWYDANVSIPGCDKNMPGCLIAMGRFNRPSIMVYGGSIRAGHSPCQNNAPIDIVSAFQSYGEFITGKIDEPTRHDIIRHACPGGGACGGMYTANTMASCAEAMGMTLPGSSSYLAGSPEKFAECEAAGSAIKRLLVDDIKPRDIMTRSAFENAMVLTMTLGGSTNSVLHLIAIAKSVGITLTLDDFQAVSNRTPFIADMKPSGKYVMEDLFAIGGIPSVLKYLHAEGLIDGSNITVTGKTLAENLRGFKDLAEGQKIIRPLSNPIKTEGHLRVLRGSLAPEGSVAKITGKEGLNFTGKARVFDAENDFIAALERGEFKKGEKTVVIIRFEGPKGGPGMPEMLKPSSAIMGAGLGKDVALLTDGRFSGGSHGFLIGHVDPEAQVGGPIALVQDGDVIEINAVKNTLDLMVDEKEMARRRSVWKAPPLKYQQGTLLKYARNVSTASKGAVTDSLE

SEQ ID NO: 95 - DNA, 1758 bp, Pichia guilliermondii
atgttatctgctagagtacattctagactattttccacttcggtggtccgttgtgagaaagtgctcaacaagtactcttcgatcgtgacccaggataagtctcaaggtgcttcgcaagccatgttgtatgctacgggctttcaagatgaagatttcgataaggctcaaattggagttggaagtgtatggtggtcaggaaacccttgtaatatgcacttgatggacatgaacgacagatgtacagcttctgtgaacaaggctggattgaaaggaatgcaattcaattccattggagtttctgatggtatcaccaacggtactgatggtatgagatattcattacaatcgagagaaatcattgccgattcatttgagactttagtgatggcccagatgtatgatggtaacattgccattccatcgtgtgacaagaatatgcctggtactcttatggctatgggtagacacaatcgtccatcgattatggtttatggtggtactatcatgcctggatctccttcttgtggtggtgcaaatgttcctgagaagattgatatcattagtgctttccaatcttatggtcaatttttgagtggacagatcaatgaggaacaaagaaaggacattgtaagacatgcttgtccaggtgctggtgcttgtggtggtatgtataccgccaacaccatggcttctgctgctgaggtcatgggtatgtcacttccatactcttcttcagctcctgccatttcgaaagaaaaagctgatgagtgtgacaatgttggttatgccatgaaacatttattagaaattgatttgaaacccaaggatataatgactaaaaagtcctttgagaatgccatcacctacatcattgccactggtggttccacaaatgcggtgttgcacttgattgccattgctcattctgtgggtattgacttgactgttgatgacttccaacgtatttctgataccactccattgttggctgatttcagaccatctggtaaatacgttatggcagatcttcaacaatttggaggtactcctgcggtgatgaaattgttgttggaagaaggtttcctcgatggagaccagtacaccgtcaccggtaataccatcaaagaaaacttatcaaaggtcaagggattgccagccagtcaagacattgttcgtcctgtttctaacccattgaaaccaaatggacacttgcaaattctcaagggtactttagcaccaggaagtgccgttggtaagattactggtaaagaaggtacctactttaagggagctgccagagtgtttgacaatgaagaattgttcatcaaggctcttgaaaagggagagatcaagaagggagaaaagaccgtttgtgtgattcgttatgagggccctaagggtggtcctggtatgcccgaaatgttgaaaccttcttcagcattgatgggttatggtttgggtaaagacgttgcattgttgactgatggtaggttctctggtggttctcatggtttcttgattggtcacatcgtgccagaagccgccgagggtggcccaattgccttggttcacgacggagatgagattgtcattgatgctgaaaacaacaaaattgacttgcttgtctcggaagaaattctcgctgaaagaaagaagctgtggtctcctcctgctccaagatacacgagaggaaccttggccaagtactccaaattggttagtgatgcttccaccggttgtgtaactgacttggactaa

SEQ ID NO: 96 - protein, 585 aa, Pichia guilliermondii
MLSARVHSRLFSTSVVRCEKVLNKYSSIVTQDKSQGASQAMLYATGFQDEDFDKAQIGVGSVWWSGNPCNMHLMDMNDRCTASVNKAGLKGMQFNSIGVSDGITNGTDGMRYSLQSREIIADSFETLVMAQMYDGNIAIPSCDKNMPGTLMAMGRHNRPSIMVYGGTIMPGSPSCGGANVPEKIDIISAFQSYGQFLSGQINEEQRKDIVRHACPGAGACGGMYTANTMASAAEVMGMSLPYSSSAPAISKEKADECDNVGYAMKHLLEIDLKPKDIMTKKSFENAITYIIATGGSTNAVLHLIAIAHSVGIDLTVDDFQRISDTTPLLADFRPSGKYVMADLQQFGGTPAVMKLLLEEGFLDGDQYTVTGNTIKENLSKVKGLPASQDIVRPVSNPLKPNGHLQILKGTLAPGSAVGKITGKEGTYFKGAARVFDNEELFIKALEKGEIKKGEKTVCVIRYEGPKGGPGMPEMLKPSSALMGYGLGKDVALLTDGRFSGGSHGFLIGHIVPEAAEGGPIALVHDGDEIVIDAENNKIDLLVSEEILAERKKLWSPPAPRYTRGTLAKYSKLVSDASTGCVTDLD

SEQ ID NO: 97 - DNA, 1782 bp, Debaryomyces hansenii
atgagtgcattgacaaagtgtaaacgtaacttaggaggtagaaacatccggttattttccaattctgctttgaattgtgacaacaagttaaataagtactcttctattgtgacccagcccaagtcgcaaggggcatcccaagcgatgttgtatgcgaccgggtttgatgaagaagatatgaacaaggcacaggttggtgttggatctgtctggtggtcaggaaatccgtgcaacatgcacttgatggagatgaacaacaaggtgaccgaatctgttaacagagccggtttgaaggggatgcagttcaactcgattggtgtctcggatgggatcactaatggtactgatggtatgagatactcgttgcaatcgcgtgaaattattgctgactcgtttgagaccatgatgatggcccagatgtacgatgccaacatcgcaattccgctgtgtgacaagaacatgccaggtaccttgatggctatgggtagacacaacagaccatctattatggtttacggtggtactattatgccaggttctccaacttgtggtaactcgattattcctgacaagattgatatcatctctgcgttccaatcgtatggtcaattcttatcggaccagatcaatgagggcgaaagaaaggatatcattaagaatgcatgtcctggtgctggtgcatgtggtggtatgtacactgccaacaccatggcctctgctgctgaagttttaggtatgtccttaccattttcgtccagtgccccagccatttcgaaggaaaaggcacatgaatgtgctactgtcggtgatgccatcaagaatttgttagtccttgacttgaagccaatggatatcatgaccaagaaggcttttgaaaatgcaatcacttatattatcgctactggtggttctactaatgccgttttacatttgattgccatggcaaacaccgttggtgttgacttaactgtcgatgatttccaaagaatttcggactccactccattattagccgatttcaagccaagtggtaagtacgttatggctgacttacaaaagtacggtggtaccccagctgtcatgaagttgttattcgaggaaggtttaattgatggatctcaatatactgtcacaggtaagactatcaaagaaaatttggaatctgttaaaggcttgccagctgaacaagaaattgtcagacccttatctaacccattaaagccaagtggccacttacaaattttaaagggtactttagctccaggtagtgctgtcggtaaaattactggtaaggaaggtacttatttcaagggtaaatctagagttttcgatgatgaaatggcattcattactgctttagaaaatggcgaaatcaagaaaggtgaaaagactgtttgtgtcattagatacgaaggtcctcaaggtggccctggtatgccagagatgttgaagccttcttctgcattaatgggttacggtttaggccaagacgttgcgttattaactgatggtagattctctggtggctctcatggtttcttaattggtcatattgttccagaagctgcagttggtggaccaattgcgttagtgcatgatggtgatgaaattgttattgacgctgaaaacaatagaatcgacttattagtatctgaagatattttagccgaaagaaagaaggaatggaccccaccaaagccaagatatacaagaggtacattggctaaatattctaagttagtcagtgatgcttcgttgggttgtgttactgatttggtataa

SEQ ID NO: 98 - protein, 593 aa, Debaryomyces hansenii
MSALTKCKRNLGGRNIRLFSNSALNCDNKLNKYSSIVTQPKSQGASQAMLYATGFDEEDMNKAQVGVGSVWWSGNPCNMHLMEMNNKVTESVNRAGLKGMQFNSIGVSDGITNGTDGMRYSLQSREIIADSFETMMMAQMYDANIAIPLCDKNMPGTLMAMGRHNRPSIMVYGGTIMPGSPTCGNSIIPDKIDIISAFQSYGQFLSDQINEGERKDIIKNACPGAGACGGMYTANTMASAAEVLGMSLPFSSSAPAISKEKAHECATVGDAIKNLLVLDLKPMDIMTKKAFENAITYIIATGGSTNAVLHLIAMANTVGVDLTVDDFQRISDSTPLLADFKPSGKYVMADLQKYGGTPAVMKLLFEEGLIDGSQYTVTGKTIKENLESVKGLPAEQEIVRPLSNPLKPSGHLQILKGTLAPGSAVGKITGKEGTYFKGKSRVFDDEMAFITALENGEIKKGEKTVCVIRYEGPQGGPGMPEMLKPSSALMGYGLGQDVALLTDGRFSGGSHGFLIGHIVPEAAVGGPIALVHDGDEIVIDAENNRIDLLVSEDILAERKKEWTPPKPRYTRGTLAKYSKLVSDASLGCVTDLV

SEQ ID NO: 99 - DNA, 1794 bp, Lodderomyces elongisporus
atgagtttcgctagcaccacaagaaggtgttgcactagatcttttgcctcctccactgttcgtcatgaattagaaaagaaaccattgaaactcaacaagtactcttccgttgtcaccgaggacccttcccaaggagcatcgcaagcaatgctctacgccacagggttctcctccgaggactttaaccgtgcacaaatcggtgtcggatccgtttggtggaccggtaacccttgtaacatgcacttgatggagttaaacaatatgtgtgcagagtcagtcaacaaggccggtttaaaagcaatgcaattcaactcaattggtgttagtgatggtatcaccaacggtacagagggtatgaaatactcattgcaatcacgtgaaatcattgctgactcatttgaaacaatgaccatggctcaattatatgacggtaatgttgccatcccaagttgtgacaagaatatgcccggtgtccttatggcaatgggtagacacaatagacccgccattatggtgtacggaggtacaatcatgcccggctcaccaacttgcggtggctcaaagctgaatcccgccattgcagataagattgacattatcagtgctttccaaagttatggacaattcttgtccaaacaaatcaacgaggaagaaagaattgatattgtgaaaaacgcatgtcctggaccaggtgcttgcggtggtatgtacactgccaacactatggcctctgcagccgaagtcttgggtttaactttacctttttcatcatcggcaccagcagtttcaaaagaaaaggccgaagagtgtgccaacgttgggtacgccatcagaaacttgcttgaactcgacttgaaaccaagagacattttgaccaaaaaatcatttgaaaacgccatcacatacatcattgctaccggtggctcaacaaatgcagttttgcacatgattgccattgcttcaagcttcgatatcgaattaactgttgacgatttccaaagaatcagtgactctactccacttttggctgactttaaaccatctggtaaatacgttatggcagatttgcaagctattggtggtacaccagcagttatgaagtttttgatgaatgaaggtatgattgatggttcgcaattgactgtgacaggtaagaccattgctgaaaacttggccaatgttccagaattgccaaagggtcaagaaatcatccactcattggacaacccattgaaaccaagcggtcacttgcaaatcttgaaaggaaccttggccccaggctcagccgttgccaagattactggtaaagaaggtacttacttcaaaggtaaagctagagtttttgacgaggaacacgcatttatcactgcattggaaaatggcgagatcaaaaagggtgaaaagactgtttgtgtcattagatacgaaggaccaaaaggtggtccaggtatgccagaaatgttgaaaccatcaagtgctttgatgggatacggattgggacaagatgttgccttattgaccgatggtagattttctggtggttcacacggattcttgattggtcacattgtccccgaggcagccgaaggtggtccaattgctcttgttgaggatggcgatgagattgttattgatgccgacaagaacatcattgacttgttggtgagcgaagacgtcttggccaagagaagagagcaatggactccacctgaacccagatacaaaagaggtacattgttcaaatatgccaaattggttagtgatgcttccaaaggatgtgttactgacttgtaa

SEQ ID NO: 100 - protein, 597 aa, Lodderomyces elongisporus
MSFASTTRRCCTRSFASSTVRHELEKKPLKLNKYSSVVTEDPSQGASQAMLYATGFSSEDFNRAQIGVGSVWWTGNPCNMHLMELNNMCAESVNKAGLKAMQFNSIGVSDGITNGTEGMKYSLQSREIIADSFETMTMAQLYDGNVAIPSCDKNMPGVLMAMGRHNRPAIMVYGGTIMPGSPTCGGSKLNPAIADKIDIISAFQSYGQFLSKQINEEERIDIVKNACPGPGACGGMYTANTMASAAEVLGLTLPFSSSAPAVSKEKAEECANVGYAIRNLLELDLKPRDILTKKSFENAITYIIATGGSTNAVLHMIAIASSFDIELTVDDFQRISDSTPLLADFKPSGKYVMADLQAIGGTPAVMKFLMNEGMIDGSQLTVTGKTIAENLANVPELPKGQEIIHSLDNPLKPSGHLQILKGTLAPGSAVAKITGKEGTYFKGKARVFDEEHAFITALENGEIKKGEKTVCVIRYEGPKGGPGMPEMLKPSSALMGYGLGQDVALLTDGRFSGGSHGFLIGHIVPEAAEGGPIALVEDGDEIVIDADKNIIDLLVSEDVLAKRREQWTPPEPRYKRGTLFKYAKLVSDASKGCVTDL

SEQ ID NO: 101 - DNA, 1770 bp, Candida albicans
atgagttttgtcaaatcttgcagagggtgtcttaggacatttgctacatccacaatcaagcatgagaaaaagttaaacaagtactcgtctattgtcacaggcgacccatctcagggtgcttcccaagcaatgctttatgccactggtttcagtgatgaagatttcgatcgtgcacaaatcggtgtcggttctgtttggtggtcaggtaacccatgtaacatgcacttgatggagttgaacaacaggtgttccgaatcagtcaacaaggccggcttaaaagccatgcaattcaactccattggtgtgtcggacggtatcaccaacggaactgaaggtatgaagtactctttacagctgagagaaattatcgccgactcctttgaaaccatgaccatggcccaactatatgacggtaacattgccattccttcatgtgataaaaatatgcccggggtattgatggctatgggaagacacaacagacctgccattatggtctatggtggtactatcttgcctggatctccaacttgcggaacccaaaaccctgctgtagccgacaaaatcgatatcattagtgctttccaatcctacggacaatacttgtcaaaacaaatcaacaacgaagaaagaatagatattgtcaaacatgcctgtccagggcccggtgcatgtggtggtatgtacactgccaacactatggcctctgcctctgaagtcttggggttgaccttaccattttcgtcctcgtccccggcagtctccaaagaaaaagccgaagagtgtgccaacgtcgggttcgccttaaagaatttgttagagttggacttgaaaccaagagatattgtcaccaaaaaatcatttgaaaacgctattgcttatatcattgccactggtggttctactaatgccgttttacatcttattgccattgcctcttcatttgacattactattactgttgacgatttccaaagaatctccgacaacactcccttgttggccgatttcaaaccatcgggtaaatacgttatggccgacttgcaaaatgtcggcggtacacctgctgttatgaaatacttgatcaaagaaggcattatcgacggtacccaattgagtgtcaccggtaaaaccatcaacgaaaacttggctaaacttgctgatttgcctgagggccaagacattgttagaccagtatcaaacccattgaagccaagtggccacttacaaatcttgaaaggtactttggctccagggtctgctgtcgctaaaatcaccggtaaagaaggtacttatttcaaaggtaaagctagagtattcaacgacgaaggtgcatttattgttgccttggaaaatggcgagatcaaaaaaggcgaaaaaacagtttgtgtgatcagatacgaaggtccaaaaggtggtccaggtatgccagaaatgttgaaaccttcgtctgcattaatgggttacgggttaggtaaagacgttgctttgttgactgatggtagattttcgggtggttcccacgggttccttattggccacattgttcctgaagccgctgaaggtggtccaattgctttggttgaagatggcgatattattgtcatcgacgcagacaataacaaaatcgatttgttggttgagccagacgtcttgaccgaaagaagaaaacactggacgcctccagaaccaagatacaaaagaggtactttggccaaatacgccaagttggtcagcgatgcatctaagggatgtgttacagatttataa

SEQ ID NO: 102 - protein, 589 aa, Candida albicans
MSFVKSCRGCLRTFATSTIKHEKKLNKYSSIVTGDPSQGASQAMLYATGFSDEDFDRAQIGVGSVWWSGNPCNMHLMELNNRCSESVNKAGLKAMQFNSIGVSDGITNGTEGMKYSLQSREIIADSFETMTMAQLYDGNIAIPSCDKNMPGVLMAMGRHNRPAIMVYGGTILPGSPTCGTQNPAVADKIDIISAFQSYGQYLSKQINNEERIDIVKHACPGPGACGGMYTANTMASASEVLGLTLPFSSSSPAVSKEKAEECANVGFALKNLLELDLKPRDIVTKKSFENAIAYIIATGGSTNAVLHLIAIASSFDITITVDDFQRISDNTPLLADFKPSGKYVMADLQNVGGTPAVMKYLIKEGIIDGTQLSVTGKTINENLAKLADLPEGQDIVRPVSNPLKPSGHLQILKGTLAPGSAVAKITGKEGTYFKGKARVFNDEGAFIVALENGEIKKGEKTVCVIRYEGPKGGPGMPEMLKPSSALMGYGLGKDVALLTDGRFSGGSHGFLIGHIVPEAAEGGPIALVEDGDIIVIDADNNKIDLLVEPDVLTERRKHWTPPEPRYKRGTLAKYAKLVSDASKGCVTDL

SEQ ID NO: 103 - DNA, 1815 bp, Pichia stipitis
atgagttttttatttaaggctgctgccgcacgccgtgttgcctccaagtcgcctgctgctgtggccagatcgttttctgtctctgctactcaatgtgaaaagaaattgaacaagtactcttcgattgtcactggtgatccctcccagggtgcttcgcaagccatgctctatgccacaggtttcgacgatgccgacttcaacagagcccagatcggtgtgggctcagtttggtggtcaggtaatccttgcaacatgcacttgatggagttgaacaacaagtgtactgaatcagtcaacagagctggtttgaagggaatgcaattcaactcgattggtatttccgatgggatcactaacggaactgaaggaatgagatactctcttcaatctcgtgaaattattgctgactcgttcgaatccatgatgcttggtcaattgtacgatggtaacattgccattccatcctgtgacaagaatatgcctggtgtcttgattgctatggccagacacaacagaccttctattatggtctatggtggtacaatcttgccaggtcaaactacttgcggaaccaacaacccagctatcgccgacaaaattgatatcatctcagctttccagtcgtatggacagtacttgaccaagtccatcactaacgaagaaagaaaggatatcgttagacacgcctgtcctggtcctggtgcctgtggtggtatgtatactgctaacaccatggcatctgcagctgaatgtcttggtatgtctttgccctattcatcttcggctccagccgtctcaaaggaaaaggatgctgagtgtgccaacatcggtcaagccatcaagcacttgttggagatcgacttgaagccccgtgatattttgactaagaaatctttcgaaaacgctatcgcttatatcattgctactggtggatctacgaatgctgtattgcacttaattgccattgcttcctcagctgatattgatcttaccgtagatgatttccagagaatctccgactccactccgttgttggcagacttcaagccatcgggacaattcgtaatggcagacttacagaagtacggtggtactccagccgtgatgaaattcttgatgaacgaaggcttcattgacggagaccagtacactgtcactggtaagaccatcaaggaaaatttggcttccgtcaaggacttgcctgctgatcagcctatcatcagaccagtcagcaaccccttgaagacaagcggtcacttgcaaatcttgaagggttccttggctccaggttctgctgtcggtaagatcaccggtaaggaaggtacctacttcaagggtaaggctcgtgtctttgatgacgaaggagacttcattgtcgccttggagaagggtgagattaagaagggtgaaaagaccgtctgtgtcatcagatacgaaggtccaaaaggaggccccggtatgcctgaaatgttgaagccttcctcggccttgatgggttatggtttaggtaaagatgttgctcttttgacagacggtaggttctctggtggatcccacggcttcttgattgggcacattgttcctgaagctgctgaaggtggacctatcggtttggtgtacgatggtgacgaaatcgtcattgatgccgaaaacaacaagatcgacttgttagtagacgaagctgtgttggctgaaagaagaaagttatggactgctcctgagccaagatacaccaggggtactttggccaagtacgccagattggtcagtgacgcttctgctggatgcgttaccgacttgccaataaagaattaa

SEQ ID NO: 104 - protein, 604 aa, Pichia stipitis
MSFLFKAAAARRVASKSPAAVARSFSVSATQCEKKLNKYSSIVTGDPSQGASQAMLYATGFDDADFNRAQIGVGSVWWSGNPCNMHLMELNNKCTESVNRAGLKGMQFNSIGISDGITNGTEGMRYSLQSREIIADSFESMMLGQLYDGNIAIPSCDKNMPGVLIAMARHNRPSIMVYGGTILPGQTTCGTNNPAIADKIDIISAFQSYGQYLTKSITNEERKDIVRHACPGPGACGGMYTANTMASAAECLGMSLPYSSSAPAVSKEKDAECANIGQAIKHLLEIDLKPRDILTKKSFENAIAYIIATGGSTNAVLHLIAIASSADIDLTVDDFQRISDSTPLLADFKPSGQFVMADLQKYGGTPAVMKFLMNEGFIDGDQYTVTGKTIKENLASVKDLPADQPIIRPVSNPLKTSGHLQILKGSLAPGSAVGKITGKEGTYFKGKARVFDDEGDFIVALEKGEIKKGEKTVCVIRYEGPKGGPGMPEMLKPSSALMGYGLGKDVALLTDGRFSGGSHGFLIGHIVPEAAEGGPIGLVYDGDEIVIDAENNKIDLLVDEAVLAERRKLWTAPEPRYTRGTLAKYARLVSDASAGCVTDLPIKN

SEQ ID NO: 105 - DNA, 1705 bp, Yarrowia lipolytica
ctacgctactaaggcgcacactttgaacaagttctccaagatcatcacggagcccaagtcgcagggagcctctcaggctatgctgtacgcctgcggcttcaacgaggccgatctgggcaagccccaggttggtgtcgcctccgtctggtggtccggaaacccctgcaacatgcacctgcttgatctcaacttcaaggtcaaggagggcatcgagaagcacaacctcaaggccatgcagttcaacactattggtgtgtctgatggtatttctatgggtaccaagggtatgcgatattctctgcaatctcgagacatgattgctgactccattgagactctcatgatggcccagcactacgacgccaacatctccatcccgggctgtgacaagaacatgcccggtgttctcatggccatgggccgagtcaaccgaccctccatcatgctgtacggaggaaccatccaccccggaaaggccgagactcgaaagggcgaggacattgatattgtttccgccttccaggcctacggacagtacattgccggcggcatctctgagaccgagcgagccgatgttattcgacacgcctgccccggtcagggagcctgtggaggtatgtacactgctaacaccatggcttctgccgcagaggtgcttggtatgactctgcctggctcctcctccgctcccgccatctccaaggagaagatggccgagtgtgaggctctgggacctgccatcaacaagctgctggagatggacctcaagcctaaggatatcatgacccgacaggcctttgagaacgctattgcttacatcattgccactggaggctccaccaacgccgttctccatctgctggctatcgctcacaccgtcgacgttcctttgaccattgacgacttccagcgaatctccgataacactcctctgctcgccgacttcaagccctccggagctcacgtcatggccgatctgcagaagtggggtggaacccccgccgtcatcaagatgctcattgagcagggtttcattgatggctctcccatgacctgttccggagagtctctcaaggacaccgtcgccaagtacccctctctccccaaggagcaggatatcttcgcctctgttgacgctcccctcaagccctctggtcatctgcagattcttaagggctcccttgctcccggtggatccgtcggaaagatcaccggaaaggagggaacattcttcaagggtaccgcccgatgtttcgacgaggaggacctgttcattgaggctctggagaagggcgagatcaagaagggcgagaagacctgtgtcattattcgatacgagggccccaagggaggacccggtatgcccgagatgctcaagccctcttctgccctgatgggatacggtctgggcaaggatgttgctctgctgaccgacggacgattctccggaggatctcatggtttcctcattggtcacattgtccccgaggcttacgagggaggtcccattggtctggttgaggacggcgatgagatcatcatcgacgctgacaacaacatcatcgacctgcttgttgatgagaagaccatggctgagcgaaaggccaagtggactccccccgctcctcgatacacctctggaaccctgcacaagtactccaagcttgtgtccgacgcctccactggctgtatcactgacgcctaa

SEQ ID NO: 106 - protein, 567 aa, Yarrowia lipolytica
YATKAHTLNKFSKIITEPKSQGASQAMLYACGFNEADLGKPQVGVASVWWSGNPCNMHLLDLNFKVKEGIEKHNLKAMQFNTIGVSDGISMGTKGMRYSLQSRDMIADSIETLMMAQHYDANISIPGCDKNMPGVLMAMGRVNRPSIMLYGGTIHPGKAETRKGEDIDIVSAFQAYGQYIAGGISETERADVIRHACPGQGACGGMYTANTMASAAEVLGMTLPGSSSAPAISKEKMAECEALGPAINKLLEMDLKPKDIMTRQAFENAIAYIIATGGSTNAVLHLLAIAHTVDVPLTIDDFQRISDNTPLLADFKPSGAHVMADLQKWGGTPAVIKMLIEQGFIDGSPMTCSGESLKDTVAKYPSLPKEQDIFASVDAPLKPSGHLQILKGSLAPGGSVGKITGKEGTFFKGTARCFDEEDLFIEALEKGEIKKGEKTCVIIRYEGPKGGPGMPEMLKPSSALMGYGLGKDVALLTDGRFSGGSHGFLIGHIVPEAYEGGPIGLVEDGDEIIIDADNNIIDLLVDEKTMAERKAKWTPPAPRYTSGTLHKYSKLVSDASTGCITDA

SEQ ID NO: 107 - DNA, 1752 bp, Candida glabrata
atgtcctccagactaacttttgctaggaagttctccagcacaagaaatgttgcaaagaaactgaataaatactcatatatcatcactgagcctaaggaccaaggtgcctctcaggctatgttgtatgccactggtttcaacaaggatgatttcagcaaagcgcaagttggtgttggttcttgttggtggtctggtaacccatgtaacatgcatctattggatttgaaccacagatgttcccaatccatcgagaaagccggtatgaaaggtatgcaatttaacacaattggtgtctctgacggtatctcgatgggtactaaaggtatgagatattctttacaaagtagagaaattatcgcagactctttcgagactatcatgatggcacaacactacgatgccaatattgctattccatcctgtgacaagaatatgcctggtgttatgatggctatgggtagacacaacagaccatctattatggtttatggtggtaccattatgccaggtcacccaacttgtggctccaagaacattccagagaacattgatgttgtctctgctttccaatcctacggtcaatacatctcgaagcaattcaatgaagaagagagaagtgatgttgtacaacactcttgtccaggtcctggctcttgtggtggtatgtacaccgccaacaccatggcctctgctgccgaagttttaggtatcactatgccaaactcttctgctttcccagctgtttctgctgaaaagattgctgaatgtgacaacattggtgctgctatcaagaacactatggaacttggtattaccccacgtcaaatcttcaccaaggaatcctttgaaaacgctatcacttacgtcattgctactggtggttccactaacgcagttcttcacttggtagctattgcacactctgctggtgtcaagatcaccccagatgatttccaaaggatcagtgacaagacaccattgctaggtgacttcaagccatctggtaagtatgtcatggccgatttgattaaggtcggtggtactcaaagtgtcatcaagttcttgtatgacaacggtttcttatacggtgacgccttaactgttactggtgaaactttggctgagcgtgccaagaaagccaagggtctaagtgaaactcaagacattattagaccattgtcaaacccaattaagccaagtggccatctacaaattctatacggttctcttgctccaggtggttctgttggtaagattactggtaaggaaggtacttacttcaaaggtaaggctcgtgttttcgaagaagaagacgctttcatctctgcattggagaatggtgaaatcaagaaaggtgaaaagacagttgttattatcagatatgaaggtccaaagggtggtccaggtatgccagaaatgttgaagccatctagtgcactaatgggttatggtctaggtaaagatgttgccttgctaactgatggtagattctctggtggttctcatggtttcttgattggtcacattgttccagaagctgccgaaggtggtccaattggtttggtcagagatggtgatgaaattgtgattgatgcagacaacaacaagattgacctcctaatctctgaatctgagatgtctcaacgtaaggccgaatggaaacctccagccccacgttacaacaggggtactctatccaaatatgctaagttagtctctaatgcctcccaaggttgtgttacagacgcttaa

SEQ ID NO: 108 - protein, 583 aa, Candida glabrata
MSSRLTFARKFSSTRNVAKKLNKYSYIITEPKDQGASQAMLYATGFNKDDFSKAQVGVGSCWWSGNPCNMHLLDLNHRCSQSIEKAGMKGMQFNTIGVSDGISMGTKGMRYSLQSREIIADSFETIMMAQHYDANIAIPSCDKNMPGVMMAMGRHNRPSIMVYGGTIMPGHPTCGSKNIPENIDVVSAFQSYGQYISKQFNEEERSDVVQHSCPGPGSCGGMYTANTMASAAEVLGITMPNSSAFPAVSAEKIAECDNIGAAIKNTMELGITPRQIFTKESFENAITYVIATGGSTNAVLHLVAIAHSAGVKITPDDFQRISDKTPLLGDFKPSGKYVMADLIKVGGTQSVIKFLYDNGFLYGDALTVTGETLAERAKKAKGLSETQDIIRPLSNPIKPSGHLQILYGSLAPGGSVGKITGKEGTYFKGKARVFEEEDAFISALENGEIKKGEKTVVIIRYEGPKGGPGMPEMLKPSSALMGYGLGKDVALLTDGRFSGGSHGFLIGHIVPEAAEGGPIGLVRDGDEIVIDADNNKIDLLISESEMSQRKAEWKPPAPRYNRGTLSKYAKLVSNASQGCVTDA

SEQ ID NO: 109 - DNA, 1764 bp, Vanderwaltozyma polyspora
atgactattgcaagcaaggcattgagtgctagacacttttcagtcactagaaatgttagtaagaagttgaataagtactcttatatcgttacagaacctaaggaccaaggtgcatcacaagcgatgctttatgcaactgggttcaagaaagaagattttagtaaaggtcaagttggtgtaggatcatgttggtggtctggtaatccatgtaatatgcatttattggatcttaatgatagatgttcacgttctgtggagaaggctggcttgaaagctatgcaatttaataccattggtgtttccgatggtatttcaatgggtactaaaggtatgagatactctttacagagtagagaaatcattgctgattcttttgaaactataatgatggctcaacattacgatgccaatattgctatcccttcatgtgataaaaacatgccgggtgtcatgatggccatgggaagacataacagaccttctatcatggtttatggtggtactattttacctggccatccaacctgtggttcttcaaaaattccagaaaacattgatatagtatctgctttccaatcttatggtcaatatatatctaaacaattcagcgaacaagagagagaagatgtggttgaacatgcttgtcctggtccaggttcttgtggtggtatgtatactgctaacactatgggttctgtcgcagaagtgctaggtttgactttgccaaactcttctgccttcccagcagtttctcaagaaaagatgaatgaatgtgattccattggtgaagctattaagaagacaatggaattaggtatcactcctcgtgatatcatgactaagcaagcttttgaaaatgcaatcacctatgttatcgcaaccggtggttccaccaatgctgttttgcacttggttgccattgctcattctgctggtgtcaagattactcctgatgatttccaaagaatcagtgataagaccccattattgggtgattttaaaccatcgggtaaatacgttatggctgatttaatcaaagtaggaggtacccaatctgttatcaaattcttgtacgaaaacggtttcttgcatggtgatgccattactgttactggtgatacattagccgaacgtgctgccaaaacttctggattaccagaaggccaagatataatcagacctgtttcacaacctattaaaccaaatggccatctacaaatattgtatggctcattggctccaggtggtgctgtcggtaaaatcactggtaaagaaggtactttctttaaaggtagggctcgtgtttttgaagaagaagaagctttcattcatgcattggaaagaggtgaaattaagaaaggtgaaaaaaccgttgttgtcatcagatatgaaggtccaaaaggtggtccaggtatgccagaaatgttgaaaccatcctctgcgctaatgggttacggtttaggtaaagatgttgccttgttaactgatggtagattttctggtggttcccatggattcttaatcggtcacattgttccagaagctgccgaaggtggtccaattggtttagttaaagatggagacgaaattgttattgatacaaataacaacaagatagatttattagtatccgaacaagaaatagcccaacgtaaatcagagtgggttaaaccagctccacgttacaccagaggtactctatccaagtacagtaaattggtatctaacgcttctaacggttgtgtattagacgctgacaattga

SEQ ID NO: 110 - protein, 587 aa, Vanderwaltozyma polyspora
MTIASKALSARHFSVTRNVSKKLNKYSYIVTEPKDQGASQAMLYATGFKKEDFSKGQVGVGSCWWSGNPCNMHLLDLNDRCSRSVEKAGLKAMQFNTIGVSDGISMGTKGMRYSLQSREIIADSFETIMMAQHYDANIAIPSCDKNMPGVMMAMGRHNRPSIMVYGGTILPGHPTCGSSKIPENIDIVSAFQSYGQYISKQFSEQEREDVVEHACPGPGSCGGMYTANTMGSVAEVLGLTLPNSSAFPAVSQEKMNECDSIGEAIKKTMELGITPRDIMTKQAFENAITYVIATGGSTNAVLHLVAIAHSAGVKITPDDFQRISDKTPLLGDFKPSGKYVMADLIKVGGTQSVIKFLYENGFLHGDAITVTGDTLAERAAKTSGLPEGQDIIRPVSQPIKPNGHLQILYGSLAPGGAVGKITGKEGTFFKGRARVFEEEEAFIHALERGEIKKGEKTVVVIRYEGPKGGPGMPEMLKPSSALMGYGLGKDVALLTDGRFSGGSHGFLIGHIVPEAAEGGPIGLVKDGDEIVIDTNNNKIDLLVSEQEIAQRKSEWVKPAPRYTRGTLSKYSKLVSNASNGCVLDADN

SEQ ID NO: 111 - DNA, 1758 bp, Saccharomyces cerevisiae
atgggcttgttaacgaaagttgctacatctagacaattctctacaacgagatgcgttgcaaagaagctcaacaagtactcgtatatcatcactgaacctaagggccaaggtgcgtcccaggccatgctttatgccaccggtttcaagaaggaagatttcaagaagcctcaagtcggggttggttcctgttggtggtccggtaacccatgtaacatgcatctattggacttgaataacagatgttctcaatccattgaaaaagcgggtttgaaagctatgcagttcaacaccatcggtgtttcagacggtatctctatgggtactaaaggtatgagatactcgttacaaagtagagaaatcattgcagactcctttgaaaccatcatgatggcacaacactacgatgctaacatcgccatcccatcatgtgacaaaaacatgcccggtgtcatgatggccatgggtagacataacagaccttccatcatggtatatggtggtactatcttgcccggtcatccaacatgtggttcttcgaagatctctaaaaacatcgatatcgtctctgcattccaatcctacggtgaatatatttccaagcaattcactgaagaagaaagagaagatgttgtggaacatgcatgcccaggtcctggttcttgtggtggtatgtatactgccaacacaatggcttctgccgctgaagtgctaggtttgaccattccaaactcctcttccttcccagccgtttccaaggagaagttagctgagtgtgacaacattggtgaatacatcaagaagacaatggaattgggtattttacctcgtgatatcctcacaaaagaggcttttgaaaacgccattacttatgtcgttgcaaccggtgggtccactaatgctgttttgcatttggtggctgttgctcactctgcgggtgtcaagttgtcaccagatgatttccaaagaatcagtgatactacaccattgatcggtgacttcaaaccttctggtaaatacgtcatggccgatttgattaacgttggtggtacccaatctgtgattaagtatctatatgaaaacaacatgttgcacggtaacacaatgactgttaccggtgacactttggcagaacgtgcaaagaaagcaccaagcctacctgaaggacaagagattattaagccactctctcacccaatcaaggccaacggtcacttgcaaattctgtacggttcattggcaccaggtggagctgtgggtaaaattaccggtaaggaaggtacttacttcaagggtagagcacgtgtgttcgaagaggaaggtgcctttattgaagccttggaaagaggtgaaatcaagaagggtgaaaaaaccgttgttgttatcagatatgaaggtccaagaggtgcaccaggtatgcctgaaatgctaaagccttcctctgctctgatgggttacggtttgggtaaagatgttgcattgttgactgatggtagattctctggtggttctcacgggttcttaatcggccacattgttcccgaagccgctgaaggtggtcctatcgggttggtcagagacggcgatgagattatcattgatgctgataataacaagattgacctattagtctctgataaggaaattgctcaacgtaaacaaagttgggttgcacctccacctcgttacacaagaggtactctatccaagtatgctaagttggtttccaacgcttccaacggttgtgttttagatgcttga

SEQ ID NO: 112 - protein, 585 aa, Saccharomyces cerevisiae
MGLLTKVATSRQFSTTRCVAKKLNKYSYIITEPKGQGASQAMLYATGFKKEDFKKPQVGVGSCWWSGNPCNMHLLDLNNRCSQSIEKAGLKAMQFNTIGVSDGISMGTKGMRYSLQSREIIADSFETIMMAQHYDANIAIPSCDKNMPGVMMAMGRHNRPSIMVYGGTILPGHPTCGSSKISKNIDIVSAFQSYGEYISKQFTEEEREDVVEHACPGPGSCGGMYTANTMASAAEVLGLTIPNSSSFPAVSKEKLAECDNIGEYIKKTMELGILPRDILTKEAFENAITYVVATGGSTNAVLHLVAVAHSAGVKLSPDDFQRISDTTPLIGDFKPSGKYVMADLINVGGTQSVIKYLYENNMLHGNTMTVTGDTLAERAKKAPSLPEGQEIIKPLSHPIKANGHLQILYGSLAPGGAVGKITGKEGTYFKGRARVFEEEGAFIEALERGEIKKGEKTVVVIRYEGPRGAPGMPEMLKPSSALMGYGLGKDVALLTDGRFSGGSHGFLIGHIVPEAAEGGPIGLVRDGDEIIIDADNNKIDLLVSDKEIAQRKQSWVAPPPRYTRGTLSKYAKLVSNASNGCVLDA

SEQ ID NO: 113 - DNA, 1752 bp, Kluyveromyces lactis
atgttttcacagtctgctgtaagaaggttttcaaccactagaaatgtgggcaagaagttgaacaagtactcgcatatcatcaccgaaccaaaggaccagggtgcatcgcaagcgatgctttatgccacggggtttaaggaagacgatttcggcaaggctcaagttggtgttggttcatgttggtggtctggtaatccatgtaatatgcatttgatggatttcaacaacagaatcaccgaatccgttaacaaggctgggttgaaaggtatgcaattcaataccattggtgtttctgatggtatttccatgggtaccaagggtatgagatattctttgcaatctagagaagttattgctgattcgttcgaaaccattatgatggctcaacattacgatgccaatatcgccattccatcttgtgataaaaacatgcctggtgttttgatggctatgggtagacataacagaccttccattatggtttatggtggtaccattttgccaggttctccaacttgtggttctgctaagattccaaagaagattgacgttgtttctgcgttccagtcctatggtcaatacttatccaaggaatttactgaaactgaaagacaagatgttgtgcaacatgcttgtccaggtccaggttcttgtggtggtatgtacactgctaacaccatggcctctgtggccgaagtcttgggtatgactttgccaaactcttcctctttcccagcagtttcaaaggaaaaattgaacgaatgtgacactatcggtgaagctatcaagaagactatggaactaggaattactcctcgtgacgttatgaccaaagaagctttcgaaaacgctatgacatatgtcattgctaccggtggttccactaacgctgttcttcatatggttgctgtcgctcactctgccggtgtcaagattactccagatgatttccaaagaattagtgacaagactccattgttgggtgatttcaaaccttctggtaaatatgtgatggcagatttgattaccgtcggtggtacccaagctgttatcaaatacttgtacgaagaaggcttcctacatggtaacactattaccatctccggtgacactttagcagaaagagcagctaaggctgtatctttgaaggatggtcaagacatcattcgtcctctaactaacccaattaagacaagtggtcatttacaaattctatacggaagtttggccccaggtgggtcagtcggaaaaattactggtaaagaaggtacttacttcaagggtaaggctagagtattcaacgacgaaccaggctttatttctgctttagaaaacggtgaaatcaagaagggtgaaaaaaccgttgtcattatcagatacgaagggccaagaggtggtccaggtatgcctgaaatgttaaagccatcttctgcattgatgggttacggtctaggtaaggatgttgctctattgactgacggtagattctccggtggttctcacggtttcttgatcggtcacatcgtcccagaagctgccgaaggtggtcctatcggtttggttcgtgacggtgacgaaattatcattgatgctgataacaacaagattgacttgttagttccagaagaagaaatcgctgaacgtagaagtacatggactgctccacctccacgttatactagaggatgtttatccaagtacgcaaaattggtttcaaatgcttcccatggttgcgtgactgatttgaactaa

SEQ ID NO: 114 - protein, 583 aa, Kluyveromyces lactis
MFSQSAVRRFSTTRNVGKKLNKYSHIITEPKDQGASQAMLYATGFKEDDFGKAQVGVGSCWWSGNPCNMHLMDFNNRITESVNKAGLKGMQFNTIGVSDGISMGTKGMRYSLQSREVIADSFETIMMAQHYDANIAIPSCDKNMPGVLMAMGRHNRPSIMVYGGTILPGSPTCGSAKIPKKIDVVSAFQSYGQYLSKEFTETERQDVVQHACPGPGSCGGMYTANTMASVAEVLGMTLPNSSSFPAVSKEKLNECDTIGEAIKKTMELGITPRDVMTKEAFENAMTYVIATGGSTNAVLHMVAVAHSAGVKITPDDFQRISDKTPLLGDFKPSGKYVMADLITVGGTQAVIKYLYEEGFLHGNTITISGDTLAERAAKAVSLKDGQDIIRPLTNPIKTSGHLQILYGSLAPGGSVGKITGKEGTYFKGKARVFNDEPGFISALENGEIKKGEKTVVIIRYEGPRGGPGMPEMLKPSSALMGYGLGKDVALLTDGRFSGGSHGFLIGHIVPEAAEGGPIGLVRDGDEIIIDADNNKIDLLVPEEEIAERRSTWTAPPPRYTRGCLSKYAKLVSNASHGCVTDLN

SEQ ID NO: 115 - DNA, 1746 bp, Ashbya gossypii
atgatgtctcacaggcggttctcgacagcgcagcggctgcgcgaggggctaaacaggtactcgagggtcataaccgagccgcgggcgcagggtgcctcgcaggccatgctgtacgcgactggtttcggtgatggggactttgcaaaggcgcaggtcggagtggggtcgtgctggtggtcgggcaacccatgcaacatgcatctgatggacctgaataaccgggtagcggcgtctgtggaccgggcgggcttgaaggcgatgcagttcaacacaatcggtgtctcggacggcatttctatggggactaccggcatgcggtactcgctgcagtcgcgcgagatcattgcagactcttttgagaccatgatgatgggtcagcactacgatggcaacgtggcaattccctcctgcgacaagaacatgcccggcgtgataatggccatggcgcggcacaaccggccctccattatggtctacggcggcaccatcatggcggggtccccttgcagcggctctacgcggctgccaaagaagattgatgttgtatctgcgttccaggcgtacgggcaatatctgtcgaagcagattacggaggaggaaagcagggatgtcgtccgtcacgcctgtccgggtccgggctcttgcggtggcatgtacacagccaacacaatggcctcagccgccgaggttctgggactgactctgcccaactcgtctgcgttcccggcgatctccgaacagaagctggccgaatgtgacgccgttggggatgccatgcgcaaagcgctcgagctcaacatcaggccacgcgacctgctcacaagggaagccttcgaaaacgcgatcacgtacgtgattgcgactggtggctcgaccaacgcagtgctccacctggttgctattgcccactctgcgggcgtgaaactgacgccggatgacttccagcgcatttccaacaaaactccgttgctgggcgacttcaagccatccggaaagtacgtcatggctgacctcattgaggttgggggtacacaggccgtcatcaagtttttgtatgaaaatggcttcatgcacggagatgccctaacggtgacaggagacacgctcaaggagcgggctgcgaagactgctcccttgcccgaaggccaggacatcattcgtcccgtgtcgcagccattgaatcctaggggacatctccagattctctatggctctcttgcgccaggcggcgctgtcggcaagatcaccgggaaggaggggaccttcttccagggccgcgcacgcgttttcgatgaagaaaacgcattcatccgcgccctggaggagggccagatcaagaagggtgagaaaaccgttgtggtcatcaggtatgaaggccccaagggtgggcccggcatgccagaaatgctcaaaccgtcttccgcgctgatgggctacggtctgggcaacgatgttgccttgctgaccgacggccgcttctccggcggctcccacgggtttttgatcggccacattgtccctgaggcctatgaaggcggcccaattgcgctcgtgcaagacggtgacgacattgtcatcgacgccgagaacaatgccatcaacctccttgtgccaaaagaagaaattgagtcgcgccgcgctcgctggacccagccggctccacgctacaagaggggcacgctcgccacctattctaagttagtctccaacgcctccaagggttgtgtcttggacagcgacgactag

SEQ ID NO: 116 - protein, 581 aa, Ashbya gossypii
MMSHRRFSTAQRLREGLNRYSRVITEPRAQGASQAMLYATGFGDGDFAKAQVGVGSCWWSGNPCNMHLMDLNNRVAASVDRAGLKAMQFNTIGVSDGISMGTTGMRYSLQSREIIADSFETMMMGQHYDGNVAIPSCDKNMPGVIMAMARHNRPSIMVYGGTIMAGSPCSGSTRLPKKIDVVSAFQAYGQYLSKQITEEESRDVVRHACPGPGSCGGMYTANTMASAAEVLGLTLPNSSAFPAISEQKLAECDAVGDAMRKALELNIRPRDLLTREAFENAITYVIATGGSTNAVLHLVAIAHSAGVKLTPDDFQRISNKTPLLGDFKPSGKYVMADLIEVGGTQAVIKFLYENGFMHGDALTVTGDTLKERAAKTAPLPEGQDIIRPVSQPLNPRGHLQILYGSLAPGGAVGKITGKEGTFFQGRARVFDEENAFIRALEEGQIKKGEKTVVVIRYEGPKGGPGMPEMLKPSSALMGYGLGNDVALLTDGRFSGGSHGFLIGHIVPEAYEGGPIALVQDGDDIVIDAENNAINLLVPKEEIESRRARWTQPAPRYKRGTLATYSKLVSNASKGCVLDSDD

SEQ ID NO: 117 - DNA, 1704 bp, Laccaria bicolor
atgaaccggcacagcagggtggtcacccaacccaaagaccaaggtgctagtcaggccatgctgtatgctacggacggcatcaaaacggatgatgacttcaacaaagccatggtcggcgtcgccagcgtctggtacgagggtaatccatgcaataaacatctccttggtctgggtcaagaaatcaaagcttcacttacaaagtctggtatcataggctaccagtttggtaccgttggagtcagcgatgggatcagcatgggaacgcgcggcatgtcctactccctccaatcccgagacctgattgcagatcaagtagagaccgctgccggaggacaccatctcgacgggatggtcgtcgttcccggctgcgataaaaatatgcctggtgttctgatggcccttgggcgtctcaaccgccctggacttatggtgtatggtgggacaattcgtgccgggtcgtgtgaaggagcgccacagttggacatcgtgtccgctttccagtcctacggaaagtacctgcaggacggaaagacacccgaagcggaacgcgaacgatataataccgttcgacatgcctgcccaggaccaggcgcttgtggtggtatgtacacagcaaacactatggcaagtgcggcggaggcactggggatgacagtccccggatcatcatccttcccagccgaatccctggaaaaacacaacgagtgtgcttcgattgggaaagttatgtacaaccttcttgagaaaaacatacttccacgggatatcatgactagatccgcgtttgaaaatgctatggtcctcacgatgattctaggcggttccaccaatgcagttctccatctaatagctatggctcactccgtgggcattaaattggatatcgacgacttccaaaacgtgtcagaccgcacccccttcctcgccgacatcaaacccagtggcaaatatgtcatggaagatgtgtacaagatcggtggaatcccaaaaattttggcgttcttgctaaagaacaagctaatcgacggaaataatatgactgtcacgggtcgaaccctcggcgaaaaccttgaggaatggacacacagatacggcgaactggattctcgacaagacgttattcgacctctcaacaaacccataaaagagacagggcacatccgaatcctcaaaggcaatcttgctcctggcggtgcggtggctaagatcacaggcaaagaaggcttggaatttactggcaaggcacggactttcgacacagaagacgatttcgtcaaggccgtcgaaagcgggtctatcaaaaagggtgaaaaaacggtcgtcattcttcggtatctcggccctcagggaggacctggcatgcctgagatgctgaaacccacaagcttaatcatgggagccggcttgggattggacgttgcctgtctcacagatggaagattcagcggcggatcccatgggttttgtattggacacgtcgttcccgaggcacaggttggtgggcccatagcgctcgtcagggacggagacaccattgtcgtcgatgccatcaagaacactatcgagctccgcgtctcacccgaggagttaacgaagagaaaagagtcttggattccacctgccctcaaggtatcccagggaacgttgtacaagtatactaagagtgttacagacgcgagccatgggtgtgtgacggacgcatga

SEQ ID NO: 118 - protein, 567 aa, Laccaria bicolor
MNRHSRVVTQPKDQGASQAMLYATDGIKTDDDFNKAMVGVASVWYEGNPCNKHLLGLGQEIKASLTKSGIIGYQFGTVGVSDGISMGTRGMSYSLQSRDLIADQVETAAGGHHLDGMVVVPGCDKNMPGVLMALGRLNRPGLMVYGGTIRAGSCEGAPQLDIVSAFQSYGKYLQDGKTPEAERERYNTVRHACPGPGACGGMYTANTMASAAEALGMTVPGSSSFPAESLEKHNECASIGKVMYNLLEKNILPRDIMTRSAFENAMVLTMILGGSTNAVLHLIAMAHSVGIKLDIDDFQNVSDRTPFLADIKPSGKYVMEDVYKIGGIPKILAFLLKNKLIDGNNMTVTGRTLGENLEEWTHRYGELDSRQDVIRPLNKPIKETGHIRILKGNLAPGGAVAKITGKEGLEFTGKARTFDTEDDFVKAVESGSIKKGEKTVVILRYLGPQGGPGMPEMLKPTSLIMGAGLGLDVACLTDGRFSGGSHGFCIGHVVPEAQVGGPIALVRDGDTIVVDAIKNTIELRVSPEELTKRKESWIPPALKVSQGTLYKYTKSVTDASHGCVTDA

SEQ ID NO: 119 - DNA, 1797 bp, Coprinopsis cinerea
atgccgccaaaatatctcccaattcgtcgtcaatggctccggtcagcgagaggcttgtctacaaccgcacggtgcagtgacaagcccgtcctgaaccggtacagcaggatcatcacccagcccaaggaccagggagcaagtcaggctatgctctatgctacagatggcataaagtcggacgcggacttcaacaagccgatggtcggtgtcgccagcgtatggtatgagggcaacccatgcaacaagcaccttctcggacttggccaggaaatcaaggcttcccttaccgaggcagacatcataggctaccagtttggtacggtcggtgtcagcgacggtattagtatgggtacgaaaggaatgtcgtattccctccagtcgcgagacttaatcgctgaccaggtggaaactgctgccggaggtcatcatctcgatggcatggtagtagtccctgggtgcgacaagaatatgcctggtgttctcatggctcttggccgtctcaaccgaccaggtctcatggtctacggtggaaccattcgcgcaggctcgtgtgaaggcatgcctcaattggatatcgtttctgctttccaggcctacggaaaataccttcaagacggaaggacacccaaggctgaggaagaacgatacaacaccgttcgacacgcctgtcctggtcctggtgcttgcggtggcatgtacactgcaaacacaatggcaagtgcagcggaggctttgggaatgacccttcccggttcttcctccttcccagcgcagtcagaggagaaacatctagagaccaagtctatcggttctgtgatgtacaacttgcttgagaagaacattttgccgagggacatcatgacgcgctctgcctttgaaaacgcgatggtcctcaccgtcatcctcggaggctcaaccaacgcagtcctccatttgatcgccattgctcactcagtcggcatcaaactcgacattgacgacttccaaaaggtgtccgaccggatacccttccttgccgacttgaagcccagcggaaaatatgtcatggaagatgtctacaagatcggtggtatccccaaggttctcgcgttcttgctcaagaacaatttgatcgatggtaataacatgactgttactggtcgcactgtcggagagaacttggaccgatggacgcacaagtacggcgagctccacttcgacaagcaggatgtcatccgacctctggataagcctatcaaggagactggtcacatccggattttgaagggtaacctcgcccctggtggcgccgtcgccaaaatcaccggaaaagaaggccttggtttcgtcggcaaagcacgtgtatttgattctgagaacgacttcgtcaaggctgtggaatctggtagcatcaagaagggcgagaaaaccgttgttattttgcggtatctcggtcctcagggtggacctggaatgcccgagatgcttaagcctaccagtttggtgatgggcgctggattgggtatggatgtcgccatcttgactgacggacgatttagcggaggatcgcacggattctgtatcggacacgtcgttccggaagcgcaagtcggtggccctatcgccttggtcgaggacggcgacatcatctcggttgacgctgtgaagaacacgatcgagttgcaggtccctgaacccgagcttgccgcgcgaaaggctgcatggaaggcaccccctctcaaggtcacccagggcaccctctacaaatacgccaaggttgtcaccgatgccagccatgggtgtgtcactgatgcttaa

SEQ ID NO: 120 - protein, 598 aa, Coprinopsis cinerea
MPPKYLPIRRQWLRSARGLSTTARCSDKPVLNRYSRIITQPKDQGASQAMLYATDGIKSDADFNKPMVGVASVWYEGNPCNKHLLGLGQEIKASLTEADIIGYQFGTVGVSDGISMGTKGMSYSLQSRDLIADQVETAAGGHHLDGMVVVPGCDKNMPGVLMALGRLNRPGLMVYGGTIRAGSCEGMPQLDIVSAFQAYGKYLQDGRTPKAEEERYNTVRHACPGPGACGGMYTANTMASAAEALGMTLPGSSSFPAQSEEKHLETKSIGSVMYNLLEKNILPRDIMTRSAFENAMVLTVILGGSTNAVLHLIAIAHSVGIKLDIDDFQKVSDRIPFLADLKPSGKYVMEDVYKIGGIPKVLAFLLKNNLIDGNNMTVTGRTVGENLDRWTHKYGELHFDKQDVIRPLDKPIKETGHIRILKGNLAPGGAVAKITGKEGLGFVGKARVFDSENDFVKAVESGSIKKGEKTVVILRYLGPQGGPGMPEMLKPTSLVMGAGLGMDVAILTDGRFSGGSHGFCIGHVVPEAQVGGPIALVEDGDIISVDAVKNTIELQVPEPELAARKAAWKAPPLKVTQGTLYKYAKVVTDASHGCVTDA

SEQ ID NO: 121 - DNA, 1791 bp, Cryptococcus neoformans
atgctttcaagacgcatcgctactgcaagcccagccgctcatactagagcattccatgcgtcggctgccaaggcctcgaaagaggtcataatgaatcgttactctaggactattactcaacctaaggctcaaggcgcttctcaggccatgctttacgccacggaaggcattgtgaatgacgaagacttcaataaggccatggttggcgttgccagtgtttggtacgaaggcaacccatgcaatcgacacattttgggccttggccagagggtgaagaagtctcttatgaatgctggcatcgttggctaccaatttggtactgtcggtgtctctgacggtattagcatgggtacctctggaatgtcttactccctgcaatctcgtgacctcattgccgactctgttgagacggctgctggtggtcattggctggatgggatggtcgttttacctggttgcgataaaaacatgcctggtgctttgattgctctcggtcgacttaatcgacccagtatgatggtttatggcggtactatccgtcctggctcttgtggcggagaggtgctcgacattgtgtcagctttccagagttatggacgatacctccaagaaggccaaacacctgaggctgaaaagacccgctacaataccattcgaaacgcatgtcctggtcctggagcctgtggaggcatgtacactgctaacacaattgcgtccgcctccgaagccttgggtatgactcttcctgggtcgtcgtctttccctgcggaatatcctgaaaagcatgcggaatgtgacgctgttggcgagactatgcgcaaggttttggaagataaccttctccccagacaaatcatgaccaggcaggctttcgaaaatgcaatggctcttacaatggcgctcggtggatctaccaacgttgttctccatttgatcgccatcgctcggtcggttggtatcaaccttaccattgacgatttccaaacggtctccgatcgagtacctttgctggccgatctcaaacccagtggtaaatacgttatggaagacatcaacaccatcggtggcacgccttccgtcattcactatctgatcaaaaacggaattatgaccggtgacgagatgaccatcaccggtaagactcttggagagaattgtgatcgctgggtggaggagcacggtagcaagtgggaaggacagaagattttgcgacctattaacgatcctcttaagtccactggacacatccgaattctgcgcggtaatcttgcccctggaggtgctgtctctaagatcacaggcaaagaaggcttgcgctttaccggtaaatgccgggctttcgatgatgaggagggcttcgtgaaggccgtcgaaagcggttctatcaaaaagggagagaaaactgttgttgtcttgaggtaccttggccccaagggcggacctggtatgcctgaaatgctcaaacctaccagtttgatcatgggcgctggtctaggatatgatgtcgcttgtctgacagatggacgatttagcggaggttctcatggcttcgttgttggccatgtcgttccggaggcccaggttggaggacccattgctttggttcaagacggcgatgttattcatattgatgccgttgcgaacactttgtctgtggacgtatccgacgaagagatggcccgcagaaaggagaactgggttgcccctcctctcaaggtcactcacggaacattgctcaaatacgcccgagctgttaccgatgcttctcatggatgtgtcacggatgcttaa

SEQ ID NO: 122 - protein, 596 aa, Cryptococcus neoformans
MLSRRIATASPAAHTRAFHASAAKASKEVIMNRYSRTITQPKAQGASQAMLYATEGIVNDEDFNKAMVGVASVWYEGNPCNRHILGLGQRVKKSLMNAGIVGYQFGTVGVSDGISMGTSGMSYSLQSRDLIADSVETAAGGHWLDGMVVLPGCDKNMPGALIALGRLNRPSMMVYGGTIRPGSCGGEVLDIVSAFQSYGRYLQEGQTPEAEKTRYNTIRNACPGPGACGGMYTANTIASASEALGMTLPGSSSFPAEYPEKHAECDAVGETMRKVLEDNLLPRQIMTRQAFENAMALTMALGGSTNVVLHLIAIARSVGINLTIDDFQTVSDRVPLLADLKPSGKYVMEDINTIGGTPSVIHYLIKNGIMTGDEMTITGKTLGENCDRWVEEHGSKWEGQKILRPINDPLKSTGHIRILRGNLAPGGAVSKITGKEGLRFTGKCRAFDDEEGFVKAVESGSIKKGEKTVVVLRYLGPKGGPGMPEMLKPTSLIMGAGLGYDVACLTDGRFSGGSHGFVVGHVVPEAQVGGPIALVQDGDVIHIDAVANTLSVDVSDEEMARRKENWVAPPLKVTHGTLLKYARAVTDASHGCVTDA

SEQ ID NO: 123 - DNA, 1833 bp, Ustilago maydis
atgctgcgatccgccctcagtccctcagcacgttgcgtcctgcgcggcggcctcgcctcccgccgcgctctccacacctcctcagccgctctcaacacagagcgcgctccgccgggcgctctaaacaagtactcgcgtatcatcacccggcccaaggatcagggagcatcgcaagccatgctctacgccaccgacggcatccagtcggacgaggacctcacgcgtgctatggttggtatcggctcgatttggtacgagggcaacccatgcaacgcgcacctgctcgccatctcgcagcgcgtcaaaaagtcggtgcagcaagccggtctcaccggttatcagtttggatctgtcggtgtttcggatggtatctcgatgggtacagacgccatgtcgtactcgctcccgtcgcgtgatctgatcgctgactcggtggaatcggcttgcggtggtcattggcttgatggctgtgtggtgattcccggttgcgacaagaacatgcctggtgtgctgatggctctcggccgtctgaatcgtcccggaatcatgctctacggcggaacgatccgtcccggtggatgtgctagcgtcgagggcacgctcgacattgtctctgctttccagtcgtacggccagtacctcgccaacggaggctctccggctgctgaaaagattcgctatgacaccgtccgcaacgcctgtcccggtcccggtgcgtgcggtggcatgtacaccgccaacaccatggcttcatgcgccgaggctctcggcatgacgctcccaggtagctcgtcgttcccggcagaataccctgaaaagatcgccgaagccgaaaatatgggagccgccatgcgcctcgtcctcgaaaaggacatcaagccgcgcgacatcatgacgcgatccgccttcgaagatgcgatcgctctcaccatggttctcggaggcagcacgaatgcagtcttacatctgattgctgtcgctcactcggtcggcatcgagctcagcattgacgacttccagcgcatcgccgacgtgactccattccttgccgacctcaagccgtcgggcaagtacgtgatggaagatgttcactcgaaactcggcggtatcccgacgattattcagtactgcatcgagaacaagctgatgaagggtgaacacatgaccgtcaccggtcgaacgcttgccgagaacgtcgaccgatggacgcacgagcgcggcaaactgcctgcaggccaagacgtgctccgaccgatcgacaagcctctcaagagcaccggccacattcgaatcctcaagggcaatcttgcgcctggtggcgccgtcgccaagatcactggaaaagagggtctgcgattcacaggtaaagcgcgcgtctttgacaccgaagatgccatggttggcgccgttgaaaagggcgagatcaagaagggtgaaaagacagtgatcgtgttgcgctacaagggtcctaagggtggacctggtatgcccgagatgctcaaacctaccagtttgatcatgggcgctggtcttgggcaggatgtagcctgtttgaccgacggtcggttctccggtggaagtcacggtttcgtcatcggtcacgtcgttcccgaggcacaggtcggaggtccgatcggcctcgtaaaggatggtgatgtgatcagcatcgatgccgagaccaacacgttggagcttgtcggtgtatccgctgccgatctcgagtcccgaagagagtcgtggaagcctctaccgctcaaaccgaaatcgggccacctgctcaagttcgttcgtaacgttgccgatgcttcgcatggttgcatcaccgatatgtga

SEQ ID NO: 124 - protein, 610 aa, Ustilago maydis
MLRSALSPSARCVLRGGLASRRALHTSSAALNTERAPPGALNKYSRIITRPKDQGASQAMLYATDGIQSDEDLTRAMVGIGSIWYEGNPCNAHLLAISQRVKKSVQQAGLTGYQFGSVGVSDGISMGTDAMSYSLPSRDLIADSVESACGGHWLDGCVVIPGCDKNMPGVLMALGRLNRPGIMLYGGTIRPGGCASVEGTLDIVSAFQSYGQYLANGGSPAAEKIRYDTVRNACPGPGACGGMYTANTMASCAEALGMTLPGSSSFPAEYPEKIAEAENMGAAMRLVLEKDIKPRDIMTRSAFEDAIALTMVLGGSTNAVLHLIAVAHSVGIELSIDDFQRIADVTPFLADLKPSGKYVMEDVHSKLGGIPTIIQYCIENKLMKGEHMTVTGRTLAENVDRWTHERGKLPAGQDVLRPIDKPLKSTGHIRILKGNLAPGGAVAKITGKEGLRFTGKARVFDTEDAMVGAVEKGEIKKGEKTVIVLRYKGPKGGPGMPEMLKPTSLIMGAGLGQDVACLTDGRFSGGSHGFVIGHVVPEAQVGGPIGLVKDGDVISIDAETNTLELVGVSAADLESRRESWKPLPLKPKSGHLLKFVRNVADASHGCITDM

SEQ ID NO: 125 - DNA, 1770 bp, Malassezia globosa
atgtcgacgacatgtgcttgcaccacagcaaagaaggatcgcccagcaccaggtgatctgaatcggtactcgcgcttgataacgcaaccaaaagatcagggtgcatcacaggcaatgttgtatgccacgcacggaatccagtcagatgaggatttacgacgtgccatggttggcgtggccagtgtctggtacgaaggcaacccatgcaacgcgcacttgctgggcgttggacagcgaattcgagattctctcgacagggccggcctgacaggctaccaatttggcacagtcggcgtgtctgacggtattagcatgggaaccagtgccatgtcgtactcgcttccgagtcgggatctcattgccgacagcgttgaaagctgcatgggtggccattggcttgatggatgtgttgtggtgccagggtgtgacaagaacatgccgggtgtgctcatggcacttggccgtctgaatcgtccaggcattatggtatatggtggcacgattcgccctggccactgcggatcgatcacaggtacacttgacattgtgagcgcgttccagagttacggacagtacctggcatcaggcggcacgcccgatgccgaaaagatccgctacgacactgtacgtcatgcgtgcccaggaccaggtgcttgcggtggtatgtacacggccaataccatggcatcatgtgcagaggtgctgggtatgacactacccggcagtagctctttccctgccgaatacaacgagaagaaggccgaatgtgacagtattgggccaacgatgcgcatgctgcttgagaagaacattcgcccgcgagatattatgacgcgcagcgcattcgaagatgcaatggtacttacgatggtgctgggtgggtcgacgaatgctgtattgcacctgctcgccatggcccgaagcgtgggcgtagacctatctatcgatgacttccaacgcgtgagtgattcaactccgttccttgccaatctgaagccaagtggccagtacgtcatggaagacgtacacaccgtactgggcggcattccttccgttgtacactacttgattgagaacaaactcatgaaaggtgagcacatgactgtaacgggtcgaacactgcgtgaaaactgtgagcaatgggttgcagagcgcggtcccatgcccaaggaccaagatgttctccgccccatcgacaagccgatcaagcgtacaggccacatccgtgttctttacggcaacctagctcccggtggtgctattgccaagatcacaggcaaggaaggtctcgaatttacagggaaagcacgcgtatttgacacggaagatgacatggtgcatgctgtcgagcaagggacgatcaaaaagggcgagaagactgtggtgatacttcgctacaaaggtcccaagggcggtccagggatgcctgaaatgctcaagccaacgagtttgatcatgggcgcaggtctcggtcacgacgttgcttgcctcacagacggccgctttagcggcggttcgcacggcttcgtgattggacatgtcgttcccgaagcacaagagggtgggccgattgcccttgtgcgggatggcgatgaaatcactatcgatgcggtgaacaactcgatccagatcaacaatgtctcagacgaggagctcgcgcagcgccgcgccgcttggcaaccccggcctcttacagtcaaccagggcggcttgtataaatacacgcgactcgtatcaaacgcaagtcagggctgtgtgacagatgcatga

SEQ ID NO: 126 - protein, 589 aa, Malassezia globosa
MSTTCACTTAKKDRPAPGDLNRYSRLITQPKDQGASQAMLYATHGIQSDEDLRRAMVGVASVWYEGNPCNAHLLGVGQRIRDSLDRAGLTGYQFGTVGVSDGISMGTSAMSYSLPSRDLIADSVESCMGGHWLDGCVVVPGCDKNMPGVLMALGRLNRPGIMVYGGTIRPGHCGSITGTLDIVSAFQSYGQYLASGGTPDAEKIRYDTVRHACPGPGACGGMYTANTMASCAEVLGMTLPGSSSFPAEYNEKKAECDSIGPTMRMLLEKNIRPRDIMTRSAFEDAMVLTMVLGGSTNAVLHLLAMARSVGVDLSIDDFQRVSDSTPFLANLKPSGQYVMEDVHTVLGGIPSVVHYLIENKLMKGEHMTVTGRTLRENCEQWVAERGPMPKDQDVLRPIDKPIKRTGHIRVLYGNLAPGGAIAKITGKEGLEFTGKARVFDTEDDMVHAVEQGTIKKGEKTVVILRYKGPKGGPGMPEMLKPTSLIMGAGLGHDVACLTDGRFSGGSHGFVIGHVVPEAQEGGPIALVRDGDEITIDAVNNSIQINNVSDEELAQRRAAWQPRPLTVNQGGLYKYTRLVSNASQGCVTDA

SEQ ID NO: 127 - DNA, 1824 bp, Aspergillus clavatus
atggatgcctccaaccccgcgctgtccagcacatccgaagcaaaatatatcaacttccccagtcttcccgatgacgcaaaacacgacgacggcacgcttgcgctgaatagatactcgtcctatatcactcgcggccatgacttccctggtgcccgggcaatgctgttcgcggcgggtatcccagatcgcgatgccatgacaaagagcccccaggttggtgttgccagtgtctggtgggagggaaacccgtgcaacatgcacctgttggatttgggcaagacggtcaagaaagccgtcacggagcagggcatgatcggatggcagtataacacgattggggtttcggatgggattacgatgggtagtgatgggatgcgattttctctgcagacgcgcgagatcatcgccgatagtgtcgagacagtgacatgtgcgcagtaccatgatgcctgtattgccatccctggatgtgacaagaacatgcctggcgtggtgatgggcatggcacggcacaatcggccgtcgatcatgatctacggtggcacgattcagatcggctattccaatctcctgcggaagcctatcaacgtgtcgtcttgtttcgaggccgcgggcgcatatgcatacgacactttgcgccaaccggacgacggaggcgataccagcaagaccaaggatgagatcatggatgacctggagagacacgcgtgccccacggcaggcgcctgcggaggcatgttcacggcaaacacgatggccacggcgatcgagtcgatggggctgtctctgcccggatcatcgtcgacacctgcgtcgtcgccatcgaagatgcgggagtgcgtcaaggcggctgaagccatcaaggtctgcatggagaagaacatcaagccccgagatctgttgaccaagcggtcatttgagaacgccctggttatgaccatggcgctgggcggaagcaccaatggtgtcttgcatttcctcgccatggccaggacggccgaggtggatctcaccttggatgatatccagcgagtgagcaataagatccccttcatcgcggatctggctccgagcgggaagtactacatggcggacctgtatgatatcggaggcattccgtctgtgcagaagctgctgatcgcagcgggtctcctcgacggcgatatccccacagtcactggcaagacgttggccgagaacgttgcctccttcccatcgctgcctcaagatcaagtcatcattcgccctctcgataagcccatcaaggcgactgggcacctgcagatcttgcgcggaaacctggcacctggaggagcagtcgccaagatcaccggaaaggagggaaccaaattcacaggcaaagcccgtgtctttaataaggagcatcaattgaacgatgctgtgacccagggcaaaattcctcgtggcgagaacctggtgcttattgtccgttacgaaggccccaagggcggaccgggtatgccggaacagctcaaagccagtgcagcgctcatgggagccaagctcaacaacgtggcgctgatcacagatgggcgatactcaggagccagtcacgggttcatcgtcggccatattgtccccgaagctgcagttggcggaccgattgctgttgtccgtgacggcgatgtgattaccatcgatgcggagaccaacaccatcagcatggatgtttcggacgaggagattcgacagcgtctgaaggaatggaagcccccaacgccccatgtcacacgtggcgtactagccaagtatgccaggctggttggagatgcctctcatggcgcgatgacggatctattctag

SEQ ID NO: 128 - protein, 607 aa, Aspergillus clavatus
MDASNPALSSTSEAKYINFPSLPDDAKHDDGTLALNRYSSYITRGHDFPGARAMLFAAGIPDRDAMTKSPQVGVASVWWEGNPCNMHLLDLGKTVKKAVTEQGMIGWQYNTIGVSDGITMGSDGMRFSLQTREIIADSVETVTCAQYHDACIAIPGCDKNMPGVVMGMARHNRPSIMIYGGTIQIGYSNLLRKPINVSSCFEAAGAYAYDTLRQPDDGGDTSKTKDEIMDDLERHACPTAGACGGMFTANTMATAIESMGLSLPGSSSTPASSPSKMRECVKAAEAIKVCMEKNIKPRDLLTKRSFENALVMTMALGGSTNGVLHFLAMARTAEVDLTLDDIQRVSNKIPFIADLAPSGKYYMADLYDIGGIPSVQKLLIAAGLLDGDIPTVTGKTLAENVASFPSLPQDQVIIRPLDKPIKATGHLQILRGNLAPGGAVAKITGKEGTKFTGKARVFNKEHQLNDAVTQGKIPRGENLVLIVRYEGPKGGPGMPEQLKASAALMGAKLNNVALITDGRYSGASHGFIVGHIVPEAAVGGPIAVVRDGDVITIDAETNTISMDVSDEEIRQRLKEWKPPTPHVTRGVLAKYARLVGDASHGAMTDLF

SEQ ID NO: 129 - DNA, 1827 bp, Neosartorya fischeri
atggactcctctacctccacgtcgtccaacacccagggcgaagccaagtatatcaacttccccagtcttcctgacgacgcaaagcatgaagatggcacccctgcgctgaacagatattcttcttatatcactcggagccatgactttcctggtgctcgggctatgctttttgcagcgggaattccggatcgcgaagcgatggctaagagtccacaggtgggaattgccagtgtctggtgggagggaaatccttgcaatatgcacctgctggacttgggcaagacggtgaagaaggccgttacggatcagggcatgaccggttggcagtataataccattggagtttcagatgccatttcaatgggtagtgagggcatgagattttctctccagtcgcgtgagatcattgcagacagcgtcgagaccgtgacttgtgcgcagtatcatgatgcatgcattgctattcctgggtgcgacaagaatatgcctggagtggtgatgggtatggcgagacacaatcggccttcgcttatgatttacggtggaacaattcaaattggatactcgaacctgctgcgaaagcgggtcaacgtgtcaacttgctttgaagcggctggtgcctatgcctacgatactttgcgtcaaccggacgatgggggtgacaccagtaaaagcaaggacgagattatggatgacattgagagacatgcttgtcccagtgcgggcgcatgtggaggcatgtttactgcaaacacaatggccacggcgattgagtccatgggcctgtccctaccagggtcatcatcaacgcctgcctcgtctccatcgaagatgcgagaatgtgttaaagcggcagaagccatcaagatctgtatggagaagaacattaagcctcgggatcttttgaccaagcgctccttcgagaacgccctcgtcatgacgatggctctgggaggaagtaccaatggtgtcttgcacttccttgccatggctcggacggcggatgtgaacctgaccctagatgatatacaacgggtcagcaacaagatcccattcattgctgacttggcccccagtgggaagtactacatggcagacctgtacgatattggagggatcccgtctgtgcagaagttgctgatcgcagcgggccttcttgacggcgacatccccacggtcaccggcaagaccttggctgagaatgttgcatctttcccatctctacctcaggaccaagtcatcatccgccccctggacaacccaatcaagacgactggccacctgcagattctacgtggaaacctggcgcctggtggagcggtggccaagatcactggcaaggagggcaccaagttcacaggcaaagcacgtgttttcaataaagaatttcagctcaacgatgctctgacccaaggcaagattcctcgaggcgaaaacctggtgctcatcgtccgctacgaaggacccaagggtggaccaggcatgccggagcagctcaaagcgagtgcggcgctgatgggagctaagctcaacaatgtggccctaatcacagatggaagatattcaggggctagtcatggattcatcgtgggtcatatcgtcccagaagctgcggccggaggacccattgccattgttcgcgatgatgatgtgattaccatcgatgcggaaaccaacacaataaacatgcatgtctcagatgaggaaatccagcagcgactgaaagagtggaagcccccagtgcctcatgtcacacgtggtgtactcgccaagtatgcaaggctggttggggacgcctctcatggtgcaatgacggatctgttctag

SEQ ID NO: 130 - protein, 608 aa, Neosartorya fischeri
MDSSTSTSSNTQGEAKYINFPSLPDDAKHEDGTPALNRYSSYITRSHDFPGARAMLFAAGIPDREAMAKSPQVGIASVWWEGNPCNMHLLDLGKTVKKAVTDQGMTGWQYNTIGVSDAISMGSEGMRFSLQSREIIADSVETVTCAQYHDACIAIPGCDKNMPGVVMGMARHNRPSLMIYGGTIQIGYSNLLRKRVNVSTCFEAAGAYAYDTLRQPDDGGDTSKSKDEIMDDIERHACPSAGACGGMFTANTMATAIESMGLSLPGSSSTPASSPSKMRECVKAAEAIKICMEKNIKPRDLLTKRSFENALVMTMALGGSTNGVLHFLAMARTADVNLTLDDIQRVSNKIPFIADLAPSGKYYMADLYDIGGIPSVQKLLIAAGLLDGDIPTVTGKTLAENVASFPSLPQDQVIIRPLDNPIKTTGHLQILRGNLAPGGAVAKITGKEGTKFTGKARVFNKEFQLNDALTQGKIPRGENLVLIVRYEGPKGGPGMPEQLKASAALMGAKLNNVALITDGRYSGASHGFIVGHIVPEAAAGGPIAIVRDDDVITIDAETNTINMHVSDEEIQQRLKEWKPPVPHVTRGVLAKYARLVGDASHGAMTDLF

SEQ ID NO: 131 - DNA, 1827 bp, Aspergillus oryzae
atggatccctccaaccccgccgtctccgcaacctttggggaagcgaaatacatcgaattcccctgtcttccagaggggacgaagcatgaggatggaacacctgcactgaatcgctactctgcaaccatcactagaggccatgacttccctggcgctaaggcaatgctctatgcagcaggtgttcccgaccaaaacgctatggcaaagagtcctcaggtaggagttgcatctgtgtggtgggaaggaaatccgtgtaacatgcacctgctggatatgggcaagacggtaaagaaggccgtcgagggccagggcatgattggttggcaatataacaccattggtgtttcagatgccatcaccatgggcagtgaaggcatgcggttttctctccaaacgcgtgagatcattgcagatagtgtcgagactgtgacttgtgctcagtaccacgatgcctgcattgccatccccggatgcgacaagaacatgcctggagtggtgatgggtatggccaggcataaccggccctccatcatgatctacggcgggactattcagattgggtattccaacctcctacgaaagccaattaacgtttcgagttgcttcgaagccgctggggcttactcatatgatactttgcgtcaaccggacgacggtggagacaccagcaagaccaaggatgagatcatggatgatcttgaaagacatgcctgtcccagcgcgggcgcatgtggaggcatgttcactgcgaacacaatggccacagctatcgagtcgatgggtctgtctttgcctggctcctcttccacccccgctacatctccatcaaaaatgcgagagtgtgtcaaggtggcggaagcgattaaagtttgcatggagaagaatataagaccgcgtgatcttttgactaagcggtcattcgaaaatgccctcgtcatgacgatggctcttggaggaagcaccaacggtgtgctccacttccttgccatggctcggacagctggcgtggaacttactttagatgatattcaaagggtcagtaacaagatcccattcattgctgacctttcccccagtggaaaatactacatggcggacttgtacgatattggcggggtaccgtctgtccaaaagctgttgattgcagggggcctgcttgatggcgatattccaacagttaccggaaagactctggccgagaacgtggcatcattcccatcgttaccggacgatcaggttattattcgtcctttggacaaccctattaaggcgactggccaccttcagatcctccgtggaaacctagcccccggaggcgctgtggccaagatcaccggcaaggagggcactaaatttataggaaaggcacgagtgtttgataaggagtatcaactcaatgatgcactcaaccagggtaaaataccccgagatgagaatttagtgatcatcgtccgttatgagggccccaagggcggaccgggaatgccggaacagctcaaggccagcgcggcattgatgggagccaagcttaccaacgtggcactgatcactgatggaagatactcaggggcaagtcatgggttcatcgtcggccatatcgtacccgaagccgcggtaggaggaccaatcgctgttgtccgcgatggggacgtggtcacaattaatgcggaaaccaacgaaattagcatggatgtctcggatgaagaaatccagcaacggctgagagagtggcaacctcccgcaccgcacgttacacgcggtgtgctggccaagtatgctcggctggttggtgacgcttcccacggcgcaatgacggaccttttctag

SEQ ID NO: 132 - protein, 608 aa, Aspergillus oryzae
MDPSNPAVSATFGEAKYIEFPCLPEGTKHEDGTPALNRYSATITRGHDFPGAKAMLYAAGVPDQNAMAKSPQVGVASVWWEGNPCNMHLLDMGKTVKKAVEGQGMIGWQYNTIGVSDAITMGSEGMRFSLQTREIIADSVETVTCAQYHDACIAIPGCDKNMPGVVMGMARHNRPSIMIYGGTIQIGYSNLLRKPINVSSCFEAAGAYSYDTLRQPDDGGDTSKTKDEIMDDLERHACPSAGACGGMFTANTMATAIESMGLSLPGSSSTPATSPSKMRECVKVAEAIKVCMEKNIRPRDLLTKRSFENALVMTMALGGSTNGVLHFLAMARTAGVELTLDDIQRVSNKIPFIADLSPSGKYYMADLYDIGGVPSVQKLLIAGGLLDGDIPTVTGKTLAENVASFPSLPDDQVIIRPLDNPIKATGHLQILRGNLAPGGAVAKITGKEGTKFIGKARVFDKEYQLNDALNQGKIPRDENLVIIVRYEGPKGGPGMPEQLKASAALMGAKLTNVALITDGRYSGASHGFIVGHIVPEAAVGGPIAVVRDGDVVTINAETNEISMDVSDEEIQQRLREWQPPAPHVTRGVLAKYARLVGDASHGAMTDLF

SEQ ID NO: 133 - DNA, 1827 bp, Aspergillus niger
atggaccccgccaaacctgccgtgtcatccactttgggggaggccaagtaccttgaatttccctgcgtaccagagggcacaaaacacgaagatggtacccccgtcttgaaccgttggtcttctactatcaccaggggccatgagttccctggcgcgaaggctatgctctacgcggcaggcatccccgatcacaatgccatgacgaagagtccccaggttggtgttgcgtctgtgtggtgggaaggcaacccttgcaacatgcacttgttggacctggccaagacggtgaagaaggcgatcacggaccaaggcatgatcgggtggcagtacaatactattggtgtgtcggatgcgattggcatggggagtgaaggtatgcgattttctctccaaacccgtgagatcattgcagacagtgtggagtctgtaacgtgcgctcaataccatgacgcctgcattgccatccccggatgcgacaagaacatgcctggtgtggtgatgggtatggcgagacacaatcggccctcgatcatgctctacggtggtactatcgaggttgggtattcccagcttcttcggaagcgggtaagcgtttcgacgtgcttcgaagcggctggtgcctacacatataacactctccgtcagccggatgacggaggtgataccagcaagaccaaggacgagatcatggatgatctggagaggcatgcctgcccgagcgcgggagcgtgtggtggtatgttcacggccaacaccatggctacggccattgagtccatgggtctctccttgcccggctcgtcttctacgcctgcatcttccccaactaagatgcgtgagtgtgtcaaggcagctgaagccatcaagatttgcatggagaagaacatccgtcctcgggatctgttgaccaagcgggcgttcgagaatgccctggtcatgactatggccctgggaggtagcaccaatggtgtgcttcacttcctggctatggcccgcactgccggcgtggaccttactctggacgacgttcagcgggtcagcaacaagatccctttcattgcggacctgtcccctagtgggaaatactacatggcggacctctacgaagtcggaggcatcccgtcggttcagaagttgttgatcgcagctggtctgctcgacggcgatatccccaccgtgaccggcaaaactctggcccagaacgtcgcatcgcacccatctctgtctgctgaccaggtcatcatccgtcccctggataaccctatcaaggcgacgggccacctccagatcctgcgaggtaaccttgcacccggtggtgcggttgctaagattaccggcaaggaagggctccggttcacgggtaaggcgcgcgtgtttgacaaggagcatcagctcaacgaggccctgaaccagggcaagatccctcacggcgagaacctggttatcgtagttcgttacgagggcccgaagggtggcccgggaatgccggaacaactgaaggccagtgcagcgctcatgggagccaagctcaccaacgtggcactgattacggacgggcggtactctggcgctagtcacggattcattgtggggcatattgtccctgaagctgctgtaggaggacccattgccgttgttcgggacggcgatgtgatcacaattgatgccgaatcgaacgccatcaccatggatgtatcggatgaggaggtgcagcagcgtctgcgggagtggaagcccccggcaccgcatgtcacacgaggtgtgctggccaaatatgcccggttggtgggagatgcctcgaacggagccatgacggatctattttag

SEQ ID NO: 134 - protein, 608 aa, Aspergillus niger
MDPAKPAVSSTLGEAKYLEFPCVPEGTKHEDGTPVLNRWSSTITRGHEFPGAKAMLYAAGIPDHNAMTKSPQVGVASVWWEGNPCNMHLLDLAKTVKKAITDQGMIGWQYNTIGVSDAIGMGSEGMRFSLQTREIIADSVESVTCAQYHDACIAIPGCDKNMPGVVMGMARHNRPSIMLYGGTIEVGYSQLLRKRVSVSTCFEAAGAYTYNTLRQPDDGGDTSKTKDEIMDDLERHACPSAGACGGMFTANTMATAIESMGLSLPGSSSTPASSPTKMRECVKAAEAIKICMEKNIRPRDLLTKRAFENALVMTMALGGSTNGVLHFLAMARTAGVDLTLDDVQRVSNKIPFIADLSPSGKYYMADLYEVGGIPSVQKLLIAAGLLDGDIPTVTGKTLAQNVASHPSLSADQVIIRPLDNPIKATGHLQILRGNLAPGGAVAKITGKEGLRFTGKARVFDKEHQLNEALNQGKIPHGENLVIVVRYEGPKGGPGMPEQLKASAALMGAKLTNVALITDGRYSGASHGFIVGHIVPEAAVGGPIAVVRDGDVITIDAESNAITMDVSDEEVQQRLREWKPPAPHVTRGVLAKYARLVGDASNGAMTDLF

SEQ ID NO: 135 - DNA, 1773 bp, Aspergillus terreus
atggacccctcgactcccgccgtgtcgtccaccatgggcgaggccaaatacatcgaatttcccagtctccccgacgacgcaaaacaccccgatggcacccccgcgctgaaccgctactcaacaaccatcacgagaggccatgactttcccggtgcgaaggccatgctgtatgcggccggcatcccggaccaggaaaccatggccaaagcgccgcacgtcggaatcgcctcggtctggtgggaggggaacccgtgcaacatgcacctgttagatctgggaaagacggtgaagaagtcggtggacgcacagggcatgatcggatggcagtacaacaccattggtgtgtcggacgccattaccatgggcagcgagggaatgcgcttctcgctgcagtcccgcgagatcatcgcggacagcgtcgagacagtcacctgcgcgcagtaccacgacgcgtgcatcgccatccccggctgcgacaagaacatgccgggcgtggtgatgggcatggcgcggcacaatcggccgtcgatcatgatctacggcggcacgatccagatcggctactccaacctgctacgcaagccgatcaacgtgtcgacgtgctttgaggcggcgggcgcctatgcctacgacacgctgcggcagccggacgacggcggcgacacgagcaagaccaaggacgagatcatggacgagctggagcagcacgcgtgcccgagcgcgggcgcgtgcggcggcatgttcacggccaacacgatggcgacggcgatcgagtcgatggggctgtcgctgcccgggtcgtcgtcgacgccggcgtcgtcgccggccaagatgcgcgagtgcgccaaggccgccgacgccatcaagcggtgtctggcgctgaacctccggccgcgcgacctgctcaccaagcgcgcggggcgcccccccgggggtggccccccccctttgagggacatcccagggggtgaggcgaccgcattcccttcattggccaccttttggcccaaggggcaaagttactccatgggcagatctgttcggagattcgggggcgtgcggtccgtgcaggaggttgtttattcgcagccggcctgcttgacggcgccatccccacggtcacgggcaagacccctcgccggagaacgtggcctcggtggccgtccctgcccgccgacccaggtcatcatccgcccgctcgacaaccccatcaagccgacgagccatctgcagattctgcgcggcaacctggcccccggcggcgccgtcgccaagatcaccggcaaggagggcacgcgcttctcgggcaaggccctcgtcttcgacaaggagtaccagctcaacgacgccctgaaccagggccagattccccgcggcgagaacatcgtcatcgtcgtccgctacgagggccccaagggcgggcccggcatgcccgagcaactcaaggcgagcgccgccctgatgggtgcgaagctcaccaatgtggccctgatcaccgatggtcggtactcgggcgcgagccatggcttcatcgtcggccatattgtccccgaggccgcggtgggtggccccattgcggtcgtccgcagcggtgatgtgatcacgattaatgcggaaaccaacgagatcaccatggatgtctcggacgaagagatccagcagcgtctgaaggagtggaagcccccagcacctcatgtcacgcggggcgtgttggccaagtatgcccggttggtgggagatgcttcgcacggtgccatgaccgacctgttttag

SEQ ID NO: 136 - protein, 590 aa, Aspergillus terreus
MDPSTPAVSSTMGEAKYIEFPSLPDDAKHPDGTPALNRYSTTITRGHDFPGAKAMLYAAGIPDQETMAKAPHVGIASVWWEGNPCNMHLLDLGKTVKKSVDAQGMIGWQYNTIGVSDAITMGSEGMRFSLQSREIIADSVETVTCAQYHDACIAIPGCDKNMPGVVMGMARHNRPSIMIYGGTIQIGYSNLLRKPINVSTCFEAAGAYAYDTLRQPDDGGDTSKTKDEIMDELEQHACPSAGACGGMFTANTMATAIESMGLSLPGSSSTPASSPAKMRECAKAADAIKRCLALNLRPRDLLTKRAGRPPGGGPPPLRDIPGGEATAFPSLATFWPKGQSYSMGRSVRRFGGVRSVQEVVYSQPACLTAPSPRSRARPLAGERGLGGRPCPPTQVIIRPLDNPIKPTSHLQILRGNLAPGGAVAKITGKEGTRFSGKALVFDKEYQLNDALNQGQIPRGENIVIVVRYEGPKGGPGMPEQLKASAALMGAKLTNVALITDGRYSGASHGFIVGHIVPEAAVGGPIAVVRSGDVITINAETNEITMDVSDEEIQQRLKEWKPPAPHVTRGVLAKYARLVGDASHGAMTDLF

SEQ ID NO: 137 - DNA, 1827 bp, Coccidioides immitis
atggcttctcaagctcctattgcgcaagatggaccaaacgaggaggcgaaatatatcgacttcccctgtcttcctgatgatgcgatgcgggacggaaaaccggccttgaacaaatattctcagttcattacaaaaggtcatgattacccaggtgcccaggcaatgttatatgctgctggggtacctgatagggatgccatgaaaacgagtcctcatgttggcattgcatcagtatggtgggaaggaaatccctgcaacatgcacttgttggatttaggaaagactgtgaaaaaggctgttatagatcagggcatgctgggatggcaatacaataccattggtgtctctgacgcaatcacaatgggtcatgaaggcatgcgcttttctctgcagtctcgtgagatcattgccgacagcatcgaaactgtgacttgcgcacaataccatgacggttgcattgccatacctggttgtgacaagaacatgcctgggtgtattatggccatgggaagacacaaccgcccctccctgatgatatacggtggtacaattcaaggcggatattcgaaactattgcgacgacccattaacgtttcgacctgctatgaggccgcgggtgcttatgcgtataatactttagtccagccggacgatgggggggacaggagcaaaactaaggatgagatcatggaagacattgaaagacatgcttgtccgagcgctggggcttgcgcaggcatgtatactgcgaacacaatggccacagcaattgagtcgatgggtctgactctgcctggttcatcttctacccccgcaacatcaccagcgaagatgcgagaatgtgtaaaagcggctgatgcaattaaattgtgcatggagaggaacatcagaccgcgcgacttattgacaaaacggtcctttgagaatgccctggtcatgacaatggctctcggtggaagcactaacggcgttgttcatttcattgccatggctagatcggctggtgttcacttaatgctagatgacatccagcgtgttagtgacaaaattccttttatcgcgaacctcgccccaagcggaaaatattacatggcagatctatacgaaattggaggcattccatccgtccagaaattgcttgtcgccgcaggccttttagatggcggtattcccacggtgactggaaagacattggcggagaacattgcatctttcccctccctcccacaagaccaagctatcattcacccacttgacaacccgatcaagtcaaccggccatctccaggtgctcaggggaaaccttgcccctggcggtgctgtcgctaaaattaccggaaaagaaggtactaaatttacgggaaaggctcgcgtatttaacaaagagcacgagttggacgccgctctaagccgtggcgagattccacgcggagataacctcgtcctcgtcgttcgatatgagggaccaaagggtggtcccggaatgccggaacaactcaaagctagtgctgccttgatgggagctaaactcacaaacgtagcgctgattacagatggcagatattcaggtgccagtcatggatttattgttggacacattgtcccagaagctgcagtgggcggtccgattgctgttgtgcaggatggtgatacgatcacaatcaacgcggataccaacgaactcacaatggatgtttctgacgaagaaatcgcacagcgtttgaaggggtggaaaccgccaaaaccacgtgttacccggggggtgctggcgaagtatgctaaattagtcggagatgcatcaaatggtgctatgactgaccagttttag

SEQ ID NO: 138 - protein, 608 aa, Coccidioides immitis
MASQAPIAQDGPNEEAKYIDFPCLPDDAMRDGKPALNKYSQFITKGHDYPGAQAMLYAAGVPDRDAMKTSPHVGIASVWWEGNPCNMHLLDLGKTVKKAVIDQGMLGWQYNTIGVSDAITMGHEGMRFSLQSREIIADSIETVTCAQYHDGCIAIPGCDKNMPGCIMAMGRHNRPSLMIYGGTIQGGYSKLLRRPINVSTCYEAAGAYAYNTLVQPDDGGDRSKTKDEIMEDIERHACPSAGACAGMYTANTMATAIESMGLTLPGSSSTPATSPAKMRECVKAADAIKLCMERNIRPRDLLTKRSFENALVMTMALGGSTNGVVHFIAMARSAGVHLMLDDIQRVSDKIPFIANLAPSGKYYMADLYEIGGIPSVQKLLVAAGLLDGGIPTVTGKTLAENIASFPSLPQDQAIIHPLDNPIKSTGHLQVLRGNLAPGGAVAKITGKEGTKFTGKARVFNKEHELDAALSRGEIPRGDNLVLVVRYEGPKGGPGMPEQLKASAALMGAKLTNVALITDGRYSGASHGFIVGHIVPEAAVGGPIAVVQDGDTITINADTNELTMDVSDEEIAQRLKGWKPPKPRVTRGVLAKYAKLVGDASNGAMTDQF

SEQ ID NO: 139 - DNA, 1788 bp, Paracoccidioides brasiliensis
atgaatcccgaagagaaggtcgatggcttcgaagagccgcgatacatccagttcccttgcctgccggacgatgcgactcgggatggaaagccggtgttgaataaatattctacatttcttacagcgatgttatatggcgcgggggtgccggatcgtgagagcatgaaaaatagcccccaggtcggcattgcgacggtatggtgggaagggaatgcctgtaatatgcaccttttggatctggggaagacggtcaaaaaagccatcacggatcaggggatgctgggctggcaatataacaccatcggtgtctccgatgctatttccatgggtagtgaaggtatgcgatactccctccaatctcgggagatcattgcagacagcatcgagacagtagtaggtgctcaatatcatgatgctgcattgcgattccgttgcgacaagaacatgccaggctgcgtcatgggtatggccagacataacagaccgtctttgatgatatacggtgggacaattcaggtcgggtactccaagttactccgcaggcgaatcaacgtctctacttgctacgaagcagctggcgcgtacgcttacaacaccttaacccagcccgacgacggcggagaccgctcgaggacgaaagatgaaatcatggaagacattgagcgaaatgcctgtcccagcgctggcgcatgcgcgggaatgtacacagcaaacaccctggctaccgcgattgagtcaatgggtttgactctgccaggctcctcgtccaccccagctacggtgcctgccaagatgcgcgagtgcgtaaaagcagcggacgcgatcagaatatgtatggagaagaacattaggccgcgagatctacttacgaaacgctcctttgagaatgcgctggtaataaccatggcgctgggcgggagcacgaacagcatcgttcacctgatagcgatggccagaacggcccgggttgaattaacactcgatgattcccagcgtgtgagcgacaaaatcccgtttattgttgacttggcacccagtgggaaatactacatggcagacctttatgaaattggcgggattccatctgtgcagaagctgttgattgccgcaggcttgatggacggtgacatccccacagtaactggcaaaacgctagcagagaacatccaatccttcccctccctcccacaggaccaggccatcatccacccgctagccaaccccatcaagagcacgggccatatacaaatattgaaaggcaacctcgcccccggcggcgccgtagccaaaatcacaggcaaagaaggcaccaaattcaccggcaaagccctcgttttcaacaaagaacacgagcttgacgaagcgcttaacaagggcctaataccccgcggcgaaaacctagtgctaatagttcgctacgagggtccgaagggtggccccggcatgcccgagcagctgaaggccagcgcagcgctgatgggcgccaaactgacgaatgtcgcgctaattacggacgggaggtattcgggggccagtcatgggtttattgtcgggcatattgtgcctgaggcggcggttggggggcccattgctgttgtgcacaatggggatatgattacgattgatgcggagagaaatgagattagtatggcggtttcggaggaggaggttgcggagaggttgaaggagtggaggccgccgaagccgcatgtgactagggggacgttggccaagtatgcgagacttgttggagacgcgtcgcatggggctatgacggatatgttttga

SEQ ID NO: 140 - protein, 595 aa, Paracoccidioides brasiliensis
MNPEEKVDGFEEPRYIQFPCLPDDATRDGKPVLNKYSTFLTAMLYGAGVPDRESMKNSPQVGIATVWWEGNACNMHLLDLGKTVKKAITDQGMLGWQYNTIGVSDAISMGSEGMRYSLQSREIIADSIETVVGAQYHDAALRFRCDKNMPGCVMGMARHNRPSLMIYGGTIQVGYSKLLRRRINVSTCYEAAGAYAYNTLTQPDDGGDRSRTKDEIMEDIERNACPSAGACAGMYTANTLATAIESMGLTLPGSSSTPATVPAKMRECVKAADAIRICMEKNIRPRDLLTKRSFENALVITMALGGSTNSIVHLIAMARTARVELTLDDSQRVSDKIPFIVDLAPSGKYYMADLYEIGGIPSVQKLLIAAGLMDGDIPTVTGKTLAENIQSFPSLPQDQAIIHPLANPIKSTGHIQILKGNLAPGGAVAKITGKEGTKFTGKALVFNKEHELDEALNKGLIPRGENLVLIVRYEGPKGGPGMPEQLKASAALMGAKLTNVALITDGRYSGASHGFIVGHIVPEAAVGGPIAVVHNGDMITIDAERNEISMAVSEEEVAERLKEWRPPKPHVTRGTLAKYARLVGDASHGAMTDMF

SEQ ID NO: 141 - DNA, 1635 bp, Phaeosphaeria nodorum
atggatccgcgcaaccttgaaaagcagcgagagccagaggagccgcgcttcctcacgttcccgcatctgccagaggatgccatgcgagatggcaagcctgcgttgaacaaatactcgtctactcttactgctggccataactttccgggagctcaggccatgctttatgcggctggtgttccctcgaaggaagccatgaagacacagcctcacgtaggcattgcgagtgtatggtgggaaggcaacccatgcaaaactgcagtgctcgacctgggaaaggagattaagaaaaacgtccaggctgacaatatgctggcatggcagtacaacactgtgggcgtgtcggatggtattacgatgggtggagagggcatgcgcttctctctgcagactcgcgagataatagcagacagtattgagacggtcacgtgcgcgcaacatcacgacgcgtgtattgccattcccggatgcgacaagaatatgcctggtgtcatcatggcatttgcccgtcacaaccgaccatcgataatggtatatggcggctccataatgccaggctattccgagacgctcaagaagcccatcaacatttcaacatgctacgagaaacacggtgcctatatctacaagaatctggagagtgctgaaaaggggaaattttcgccagaggaaatcatggatgacattgagcgcaatgcatgcccgggtgctggcgcatgtggcggcatgtacactgccaacactatgtccacgtccattgaggccaagatgcgcgaatgtgccaaagctgcagctgccatccgcgtctgcatggaaaagaacatcacgccccggaaactactcaccaaggcctccttcgagaatgccctcgtcatgatgatggtcctcggcggctcgaccaacgccgtcctgcacatgctcgccatggccggtacagcaggcgtccccttaacccttgacgacttccagcgcgtgtccaacaaaattcccttcctcgccgacctcgccccctctggccgctacatggctgccgacctctttgacattggcggcatgccctccgtcatgaagctcctcgtcgccgcgggcctccttgacggtagcatccccaccgttaccggcaagaccctcgcagaaaacatcgagccctacccttccttgccgcaagatcaggtcctcatccgccccctctccaaccccatcaaagccaccggccacatcgagatcctacgcggcaacctcgcgcccgccggcgccgtggcgaaaatcacggggaaagagggcttgatattccgcggtagggcgatggtatttgacaaggaacaccagcttgacaaggcgctgaatgaaggtcgtattccgcatggcgagaatatcgtcgttgtcgtgcgctacgagggaccgaagggtggcccgggtatgcccgagcaactcaaagccagcgcggcgattatgggcgcgaaactcaccaacgtcgcgctaattacggatgggcggtatagtggtgccagtcacgggtttattgtcgggcacatgtgtccagaagcggccgtgggtggccccattgctgtggttagggatggggatgttatcactattggtaagtcgtgttgcaaagtcggagagagatggtga

SEQ ID NO: 142 - protein, 544 aa, Phaeosphaeria nodorum
MDPRNLEKQREPEEPRFLTFPHLPEDAMRDGKPALNKYSSTLTAGHNFPGAQAMLYAAGVPSKEAMKTQPHVGIASVWWEGNPCKTAVLDLGKEIKKNVQADNMLAWQYNTVGVSDGITMGGEGMRFSLQTREIIADSIETVTCAQHHDACIAIPGCDKNMPGVIMAFARHNRPSIMVYGGSIMPGYSETLKKPINISTCYEKHGAYIYKNLESAEKGKFSPEEIMDDIERNACPGAGACGGMYTANTMSTSIEAKMRECAKAAAAIRVCMEKNITPRKLLTKASFENALVMMMVLGGSTNAVLHMLAMAGTAGVPLTLDDFQRVSNKIPFLADLAPSGRYMAADLFDIGGMPSVMKLLVAAGLLDGSIPTVTGKTLAENIEPYPSLPQDQVLIRPLSNPIKATGHIEILRGNLAPAGAVAKITGKEGLIFRGRAMVFDKEHQLDKALNEGRIPHGENIVVVVRYEGPKGGPGMPEQLKASAAIMGAKLTNVALITDGRYSGASHGFIVGHMCPEAAVGGPIAVVRDGDVITIGKSCCKVGERW

SEQ ID NO: 143 - DNA, 1803 bp, Gibberella zeae
atggcggaccaagtcactcacgatcccaagcagtcaagcgactacatccccttcccttgccttcctcccggcggagctctcaaccgttggtctacaaagatcacccgcgagcatgactaccccggagctcaggctatgctctacggagctggtgtcaaggaccagcacacaatgaagaacgcgccccaggttggtgttgctaccgtctggtggcaaggaaacccgtgcaatacccatctccttgatcttggccagatcgtcaagaactccatcgagaaggaaggcatgatcggctggcagttcaacaccgttggtgtatctgacgccatcaccatgggcggcgagggcatgcgcttctctcttcaaactcgagaaatcattgctgattctatcgagtccgtaacctgcgcccagcatcatgacgccaacatctccattcccggctgtgacaagaacatgcccggcacagtcatggccgccgctcgtcacaaccgccccttcatcatgatctacggcggtaccatccgcaagggccactccaacctccttgagaagcccatcaacatcagcacctgctacgaggcctcgggtgctttcaactacggtcgtctgcatgccaagacgaaccccggcgagcctggtcgcgagagctccgatgtcatggatgatatcgagaagcacgcttgtcccggcgccggagcttgtggtggcatgtatacagccaacaccatggctaccgctatcgaggccatgggccttactctgcctggttcatcatcgtaccctgccgagtctcctgagaagcgtcgtgagtgtgagcgcgctgcccaggttatccgaactaccatggagaaggaccttcgtcctcgcgatatcatgacccgtgcctctttcgagaacgctcttgtcctgaccatgattctcggtggttcaacaaacggtgttcttcacttcctcgccatggccaacaccgccgatgttcccctgaccattgacgacatccagcgtgccagtgaccgcacccccttcctcgctgatctcgcccccagtggaaagtactacatggaggatctctacaaggtcggcggtacaccctccgtcatcaagatgctcgtcgcccgtggtcttctcgacggtagcatcatgaccattaccggcaagactctcgccgagaacgtcgcggactggcctagtctggaccccggccaggacatcatccgtcctcttgagaaccccatcaaggactctggccacatccgcatcctaaagggtaactttgcccccggcggcgccgtcgctaagatcactggaaaggagggtctgtccttcaccggcaaggcccgtgtcttcaacaccgagaaggagctcaacggcgcactgaaccgaagcgagatcaagcagtccgatggtaacctcgtcgtcatcgtccgatacgagggccccaagggcggtcccggtatgcctgaacagctcaaggcttctgcagccatcatgggtgccggcctctccaacctggcacttgtcaccgacggacgatacagtggtgcttctcacggtttcatcgtgggccacgttgtgcctgaggctatggtcggaggtcccatcgctctggtcaaggatggagacgagatcactatcgatgcgattaacaaccgaatcgatgtcgacatcactgacgaggagatggagaagcgaaggagtgagtggaagcctcctgcgccccgtgttacgaggggtgtgttggccaagtatgcccgcttggtcggtgatgcttcccacggtgctgtaacagatcagtggtag

SEQ ID NO: 144 - protein, 600 aa, Gibberella zeae
MADQVTHDPKQSSDYIPFPCLPPGGALNRWSTKITREHDYPGAQAMLYGAGVKDQHTMKNAPQVGVATVWWQGNPCNTHLLDLGQIVKNSIEKEGMIGWQFNTVGVSDAITMGGEGMRFSLQTREIIADSIESVTCAQHHDANISIPGCDKNMPGTVMAAARHNRPFIMIYGGTIRKGHSNLLEKPINISTCYEASGAFNYGRLHAKTNPGEPGRESSDVMDDIEKHACPGAGACGGMYTANTMATAIEAMGLTLPGSSSYPAESPEKRRECERAAQVIRTTMEKDLRPRDIMTRASFENALVLTMILGGSTNGVLHFLAMANTADVPLTIDDIQRASDRTPFLADLAPSGKYYMEDLYKVGGTPSVIKMLVARGLLDGSIMTITGKTLAENVADWPSLDPGQDIIRPLENPIKDSGHIRILKGNFAPGGAVAKITGKEGLSFTGKARVFNTEKELNGALNRSEIKQSDGNLVVIVRYEGPKGGPGMPEQLKASAAIMGAGLSNLALVTDGRYSGASHGFIVGHVVPEAMVGGPIALVKDGDEITIDAINNRIDVDITDEEMEKRRSEWKPPAPRVTRGVLAKYARLVGDASHGAVTDQW

SEQ ID NO: 145 - DNA, 1923 bp, Neurospora crassa
atggcttccaaccaagataataaggctgtcgctcccgacgccgccgctcccgccggccagtccaccaccaccacgaccaccaacgacaacagcgagcgcaacttgcccaaagagggcgaatacatccaatggcgtactctcccagctggcaaccccgaccagttgaaccgctggtcgcactttttgactcgtgagcatgagtttcctggagctcaggccatgctctacggcgccggtgtcccgaataaggacatgatgaagaaggcgccgcatgtcggcattgcgacggtctggtgggagggcaacccctgcaacacccatttgctggatcttggccaaaaggtcaagaaggccgttgagcgcgagaagatgcttgcgtggcagttcaacaccattggtgtctcggatggtatcaccatgggcggagagggcatgcgctactcgcttcagtctcgcgagatcatcgccgactccatcgagaccgtgacgtgcgctcagcatcatgacgccaacatctccattcccggctgcgacaagaacatgcccggtgtcatcatggccgcggcccgccacaaccgtcccttcgtcatgatctacggcggcaccatgcgcggcggccactcggagctcctcgaccgccccatcaacatcgtcacttgctacgaggcttccggcgcttacacgtatggccgtctcaagcccgcttgccccaacagcaccgccaccccttcggacgtcatggacgacatcgagcagcacgcctgccccggcgccggcgcctgcggcggcatgtacaccgccaacaccatggcgaccgccatcgaagccatgggcctcaccgcaccgggctcctcttctttccctgcctcttcgcccgaaaagttccgcgagtgcgaaaaagccgccgagtacatcaagatctgtatggagaaggacattcgcccgcgcgacctcttgaccaaggcctcgttcgagaacgccctcgtgctcaccatgatcctcggcggttctaccaatggcgttctgcactacctcgccatggccaactcggccgacgtcgacttgactctggacgacatcaaccgcgtctcagccaagacgccctttttggctgacatggccccctccggcaggtactacatggaagacctgtacaaagtcggcggcacccccgcggtcctcaagatgctcatcgccgcaggctatatcgatggcaccatccccactatcaccggcaagtctttggcggaaaacgtatccgactggcctagtctcgaccccgatcaaaaaatcatccgcccccttgacaaccccatcaagtcccaggggcatatccgtgtcttgtacggaaacttctcccccggtggtgcggtcgccaagattacaggcaaggaaggtctctccttcaccggcaaagcccgttgtttcaacaaggaattcgagctcgacgccgccttgaagaactcggaaattaccctcgagcaaggaaaccaggtcctcatcgtgcggtacgaaggacccaaaggcggtccaggtatgccagagcaactgaaggcttcagcggcgatcatgggcgcgggcctgacgaatgtcgcgctggtgacggatggtcggtactctggtgcgtcgcatgggtttattgtgggccatgtggtccccgaggcggcgacgggggggccgattgcgctggtgaaggacggggatttgattacgattgatgcggttaggaaccggattgatgtcgtcaagactgtggaaggcgtcgagggtgaggaagagattgccaaggtgttggaggagagaaagaaggggtggaaggcgccgaagatgaagccgacgaggggggcgttggccaagtatgcgaggttggtgggggatgcgtcgcatggggctgttactgatttgggtggggatgcctattag

SEQ ID NO: 146 - protein, 640 aa, Neurospora crassa
MASNQDNKAVAPDAAAPAGQSTTTTTTNDNSERNLPKEGEYIQWRTLPAGNPDQLNRWSHFLTREHEFPGAQAMLYGAGVPNKDMMKKAPHVGIATVWWEGNPCNTHLLDLGQKVKKAVEREKMLAWQFNTIGVSDGITMGGEGMRYSLQSREIIADSIETVTCAQHHDANISIPGCDKNMPGVIMAAARHNRPFVMIYGGTMRGGHSELLDRPINIVTCYEASGAYTYGRLKPACPNSTATPSDVMDDIEQHACPGAGACGGMYTANTMATAIEAMGLTAPGSSSFPASSPEKFRECEKAAEYIKICMEKDIRPRDLLTKASFENALVLTMILGGSTNGVLHYLAMANSADVDLTLDDINRVSAKTPFLADMAPSGRYYMEDLYKVGGTPAVLKMLIAAGYIDGTIPTITGKSLAENVSDWPSLDPDQKIIRPLDNPIKSQGHIRVLYGNFSPGGAVAKITGKEGLSFTGKARCFNKEFELDAALKNSEITLEQGNQVLIVRYEGPKGGPGMPEQLKASAAIMGAGLTNVALVTDGRYSGASHGFIVGHVVPEAATGGPIALVKDGDLITIDAVRNRIDVVKTVEGVEGEEEIAKVLEERKKGWKAPKMKPTRGALAKYARLVGDASHGAVTDLGGDAY

SEQ ID NO: 147 - DNA, 1575 bp, Coprinopsis cinerea
atggataaaccccagatcggtatttcgccggtctggtgggaaggcaatccatgcaatttccacctccttgaccttgcaaagcatgtcaagaaaggctgtcaagaagaagaccagattgggttgatctttaataccatcggtgtcagtgatgccattacgatgggtacagacggaatgcggtacagtctacccagtcgagacctcatcgcggactccatcgaagcagtcgtcatggcccagcactacgacggaaacatcgctattcctggatgcgacaagaacatgcccggctgcttcatggctgctgtccgacacaaccgaccgaccattatcgtctatggagggactatccaacctggtacccggcacgttggtgcctttactgtgggcaagatcaccgatgagcagaggttcgacgttgtgcgacatgcctgtcctggccccggagcctgcggcggaatgtacactgcgaacacgatgagttctgccctcgaggtcctcggcttgtcgctcccgtattcttcaagtatcccagcgatgcatccagagaaggtccaagaatgcttcagggctgccaagtacatgaagaagctgcttgagttggatttgaagcccagggatatcttgacgaagcagtccttcctgaatgccattgtcatcatcaccgttctgggaggctccacgaacgcggttctccacttgttggcaatggcccgagctgctgagattgatctcaccatcgacgacttccaagctgtagcagacaggacaccattcctggccgacctcatgccgtcaggtcgctattacatggaagacatccaccgcattggcggcatccccgccatcgtcaagtatttgttgaaccactccgatctcatcgacggaaaccagatgactgtcactggaaagacgctggctgagaacctagcggatgttcctgagcttgagttccataaccaggacgtcttccgtccactggacaatcctatcaagccgacaggtcatatcacgatcttgagaggtaacctggcgccagaaacagctgttgcgaagctcactggcaaagagggactgagattcgagggtgtcgcgcgttgcttcgatagcctcgagaagttctaccccgctcttgctgcaggggaaatcaaacccggaactgtcctaatcttcagatatcaaggtcccaaaggtgcacccggtatgccggagatgttgggtatgagcgctgcatcgcgtggtccaactggagctatcgcaggcgctggcttggccaactcgactgcgttgatcacggacggccgtttctctggcgccagccgagggtttattattgggcacgtcgtcccagaggcacgagttggcggacccattgcccttgtcaaggacggagacaagatcgtcatcgacgccgagactcgaacaatcaactggctcgtggatgaggaagaacaagcaaagaggaggaaagaatgggaggcgtcggataacggcaagttgaatgtgaagagaggagttttgtaccgatatgccagagatgtcgcgcctgcaagcatgggagcatattgtgattga

SEQ ID NO: 148 - protein, 524 aa, Coprinopsis cinerea
MDKPQIGISPVWWEGNPCNFHLLDLAKHVKKGCQEEDQIGLIFNTIGVSDAITMGTDGMRYSLPSRDLIADSIEAVVMAQHYDGNIAIPGCDKNMPGCFMAAVRHNRPTIIVYGGTIQPGTRHVGAFTVGKITDEQRFDVVRHACPGPGACGGMYTANTMSSALEVLGLSLPYSSSIPAMHPEKVQECFRAAKYMKKLLELDLKPRDILTKQSFLNAIVIITVLGGSTNAVLHLLAMARAAEIDLTIDDFQAVADRTPFLADLMPSGRYYMEDIHRIGGIPAIVKYLLNHSDLIDGNQMTVTGKTLAENLADVPELEFHNQDVFRPLDNPIKPTGHITILRGNLAPETAVAKLTGKEGLRFEGVARCFDSLEKFYPALAAGEIKPGTVLIFRYQGPKGAPGMPEMLGMSAASRGPTGAIAGAGLANSTALITDGRFSGASRGFIIGHVVPEARVGGPIALVKDGDKIVIDAETRTINWLVDEEEQAKRRKEWEASDNGKLNVKRGVLYRYARDVAPASMGAYCD

SEQ ID NO: 149 - DNA, 1767 bp, Laccaria bicolor
atgtcagctccgggagacgtttacattcacgatgtcctcaagaaatcgagcctccccgattcgaagttgaacaggatatcctgtcaattaacgcaaaacaagattcggggtggcgctcaggcgatgctttacgctgtcggtttgagtgaggacgatatgaacaagcctcagattgggatttctccagtgtggtgggaagggaacccatgtaactctcaccttcttgaccttgccaagcacgtaaaggaaggttgtaaagcagaggatcttgttggtcttatcttcaataccattggcgtcagcgacgcgattacgatgggaacagatggaatgagatattctctgccaagtcgagatatcattgcagattcaatcgaagctgctcaacattacgacgccaacatctcaataccagggtgtgacaagaacatgccaggttgcttcatcgccgcagtccgtcataatcgaccaacgatcattgtttacggtggaactattcaaccgggcgtccggcatgtcgattgcccttcgatgggcaaggaaaaaggtggatcagtgaatatctctgacgcatttgaatcttatggggcattcgccgttggaaaaattaacgacgtggagcgatttgatgtcgttcgccacgcatgtcctggcgcaggggcttgtggaggcatgtacactgcgaacaccatgagttcagcccttgaggctcttgggatatctttgccctattcatcgagcacgccagccctgtaccccgagaaggttcaagagtgttttcgagcagcaaagtatttaaaacgtttgcttgaattagatctgaagcccaaggacattttgacccgaaactcgtttttaaatgctatcgtcatcataaccgttctcggtggctccacgaatgcagttttgcacttgctagctatggctcgcgcagctgaggtagaactcacaatcgatgacttccaaatgattgcagacaaaacgcctttcctggccgatttaatgccttcagggaggtattatatggaggatatccacaagatcggaggaatccctgccattctgaaatacctattgaaccacaccgatcttatcgatgggacacagatgacggtgaccgggcgtactttggcagaaaacctcgcagatgtacctgagctcgagttcgataagcaagatgttgttcgaagcttgagcaatcctatcaagaaaacgggccatatcacgatcatgcggggaaatctagctccagagacggccgtagccaaactcacagggaaagaaggtctcaaatttgagggaattgcgagatgctttgatagcttggatggattctatccagcgcttgaggcgggtgagatcaaggcaggcacggtgcttatctttaggtatcaaggaccaaaaggtgcacccggtatgcccgagatgcttggtccaacaggagccattgcaggcgctggacttgctcgttccacagccttaataacagatggtcgcttctcaggagccagtcgaggatttatcataggtcacgtcgtgccggaagcccgtgttggaggacctatcgcactcgttaagaatggggaccgaatcgtcattgattccgagacccgaacgatcaactggctggttgatgagaacgaacaaaaactgcgcaaggcagaatgggatgcctcagagaattcgaaattcaatgtcgggcggggtgtacttttgaggtacgctcgagatgtcgcaccggccaaccttggagcatattgcgattga

SEQ ID NO: 150 - protein, 588 aa, Laccaria bicolor
MSAPGDVYIHDVLKKSSLPDSKLNRISCQLTQNKIRGGAQAMLYAVGLSEDDMNKPQIGISPVWWEGNPCNSHLLDLAKHVKEGCKAEDLVGLIFNTIGVSDAITMGTDGMRYSLPSRDIIADSIEAAQHYDANISIPGCDKNMPGCFIAAVRHNRPTIIVYGGTIQPGVRHVDCPSMGKEKGGSVNISDAFESYGAFAVGKINDVERFDVVRHACPGAGACGGMYTANTMSSALEALGISLPYSSSTPALYPEKVQECFRAAKYLKRLLELDLKPKDILTRNSFLNAIVIITVLGGSTNAVLHLLAMARAAEVELTIDDFQMIADKTPFLADLMPSGRYYMEDIHKIGGIPAILKYLLNHTDLIDGTQMTVTGRTLAENLADVPELEFDKQDVVRSLSNPIKKTGHITIMRGNLAPETAVAKLTGKEGLKFEGIARCFDSLDGFYPALEAGEIKAGTVLIFRYQGPKGAPGMPEMLGPTGAIAGAGLARSTALITDGRFSGASRGFIIGHVVPEARVGGPIALVKNGDRIVIDSETRTINWLVDENEQKLRKAEWDASENSKFNVGRGVLLRYARDVAPANLGAYCD

SEQ ID NO: 151 - DNA, 1794 bp, Ustilago maydis
atggtcaacggagaagtcgagctgcgcacaacttcgcgcaccaatggtgacgctcccgccccgatcctgaacaggatcagtcgatacatcacgcaatcctccgacaagggagctgctcaatccatgcttcacgcgtgcggtctttcggtacaagacctcgacaagccccaggttggcatctcatctgtatggtgggaaggcaacccatgcaatactcacctgctcgaatttggccgcaagatcaagcaaggctgcgaagcggaaggtctggtgggcttgcaaaataacacggtgggcgtttccgatgccatcaccatgggcggccccggaatgcagtattcgcttccttcgagagagctgatcgccgactctatcgagacgatcaccctcgcgcagtatcatgacgctaatgtgtccatccccggttgtgacaagaacatgcctggctgtctcattgcttgtctgcgtcacaaccgcccatcaatcatcgtttatggcggcacgatccaacccggcaagcacggaatggacatacccgctcttggaaggaagaagggcgacccatgcaatgtcgccgacaatttcgaagcgacaggagcttacgccaagggcctcatcacggcagaagagcgtgtcgacctgatccgcaacgcctgtcccggtcctggtgcttgcggaggcatgtacaccgccaacaccttgtctatcgcgatcgaagtcatggggatgggtctcccgttgaccagcagtactcccgctgtctaccctgaaaagatgcaagaatgtctgcgtgttggagcctacatcaagaatctgctagccaaggatatcaagcctcgcgacatcatgaccaagaaggcttttgagaatgctatcgtgatgactcatgttcttggtggctcgactaatgctgttctccatctcatcgctgttgcacgtgctggcgatatcgacattaccatcgacgacttccaaaggctcggcgacaagacacccatgttggccgacgtcaagccatcgggcaagtattacatggaagacattcacaagatcggaggtgttcctcgtgtgctcaagtacattctggagaacacggatctgcttcatggtgacgtgatgacggtgacgggtaaaacgatgcgcgagaatctcgtcgatgttgaaccactggagtttgagacgcaagatatcatccgacctctcagcaaccctatcaaggcaacgggccacctgaccatcatgcgtggatcgctgtgccccggcggagctgtgtccaagctgacgggcaaagaggggctgtactttgacggcagcgctgttgtctttgactctgaagacggcatcaccgaagcaatcgcagaaggccgtgtcaaagaaggcagcgttgtcgtcattcgctatgttggaccaaaaggtggtcctggtatgcccgagatgctcggaccaaccggtgcgatcatgggcgcaggtctcggaaaaacagtagcgctcatcaccgacggtcgtttctctggcgcttcgcacggattttgcacaggacatgttgtgccagaagcagccctgggaggaccgatcgcgctcgtacaagacggagacaggatcactgtcgatgccaacacgcgcgagatcaacttgcacatcagtgacgaagagatggagaagaggaaacagtggtggctcaaagagaaaaagcctactctgacaaagaaacacaagcgcggttggctgtacaagtttgcaagggatgtacaaaacgcttccgagggttgtgttactgatcgcgatctgttttga

SEQ ID NO: 152 - protein, 597 aa, Ustilago maydis
MVNGEVELRTTSRTNGDAPAPILNRISRYITQSSDKGAAQSMLHACGLSVQDLDKPQVGISSVWWEGNPCNTHLLEFGRKIKQGCEAEGLVGLQNNTVGVSDAITMGGPGMQYSLPSRELIADSIETITLAQYHDANVSIPGCDKNMPGCLIACLRHNRPSIIVYGGTIQPGKHGMDIPALGRKKGDPCNVADNFEATGAYAKGLITAEERVDLIRNACPGPGACGGMYTANTLSIAIEVMGMGLPLTSSTPAVYPEKMQECLRVGAYIKNLLAKDIKPRDIMTKKAFENAIVMTHVLGGSTNAVLHLIAVARAGDIDITIDDFQRLGDKTPMLADVKPSGKYYMEDIHKIGGVPRVLKYILENTDLLHGDVMTVTGKTMRENLVDVEPLEFETQDIIRPLSNPIKATGHLTIMRGSLCPGGAVSKLTGKEGLYFDGSAVVFDSEDGITEAIAEGRVKEGSVVVIRYVGPKGGPGMPEMLGPTGAIMGAGLGKTVALITDGRFSGASHGFCTGHVVPEAALGGPIALVQDGDRITVDANTREINLHISDEEMEKRKQWWLKEKKPTLTKKHKRGWLYKFARDVQNASEGCVTDRDLF

SEQ ID NO: 153 - DNA, 2337 bp, Saccharomyces cerevisiae
atgctgtctgcacgttctgccatcaagagacccattgttcgtggtcttgcgacagtctccaacttgactagagattcaaaagtcaaccaaaacttattagaagatcattcttttattaactacaagcagaatgtggaaacgctggatatcgtaagaaaaagattaaacaggccatttacctacgcggaaaagattttgtacggtcacttggatgaccctcatggtcaagatattcagagaggtgtttcatacctaaaattaagaccagatcgtgttgcctgtcaagatgctactgctcaaatggctattttacaatttatgtccgctggtttaccacaggttgctaagccagtcactgtccactgtgaccatttgattcaagcacaagttggtggtgaaaaagatttgaagagagctatagatctaaacaaggaagtttatgatttcttggcctctgccactgcgaaatataacatgggtttctggaagccaggttccggtatcattcaccaaattgttctggaaaactacgctttcccaggtgctttgatcattggtactgactcccatacaccaaatgctggtggtttaggtcaattggctattggtgttggtggtgctgatgccgttgatgttatggcaggtcgtccatgggaattgaaggctccaaagatcttaggtgttaagttgactggtaagatgaacggttggacttctccaaaggatattattttgaaattggctggtatcacaactgtcaaaggtggtactggtaaaattgttgaatatttcggtgatggtgttgacaccttctccgctactggtatgggtaccatttgtaatatgggtgctgaaatcggtgctaccacatctgttttcccattcaacaaatctatgattgaatatttggaagcaactggtcgtggtaagatcgctgactttgctaaattataccacaaggacctattatctgctgataaggatgctgaatacgatgaggtcgtcgaaattgacttgaacactctggaaccatacatcaatgggccatttacccccgatttggctactccagtttctaagatgaaggaagttgctgttgctaataactggccattggatgtcagagtcggtttgatcggttcttgtaccaattcctcttatgaagatatgtctcgttcagcatccattgtcaaggatgctgctgctcatggtttgaaatccaagaccattttcactgttactccaggttctgaacaaatcagagccactattgaacgtgatggccaattagaaaccttcaaagaatttggtggtatcgttttggcaaacgcctgtggcccatgtattggtcaatgggatcgtagagatatcaagaaaggtgacaagaatactatcgtttcctcttacaacagaaatttcacttctagaaatgatggtaacccacaaactcatgcttttgttgcatctccagaattagtaactgcgttcgccattgcgggtgatttgagattcaaccctctaacagacaaattaaaggacaaggatggtaatgagttcatgttgaaaccaccacatggtgatggtttgcctcaaagaggttatgatgctggtgagaacacttaccaagctccacctgcagaccgtagcaccgttgaagttaaagtttctccaacttcagaccgtctacaactgttgaaaccattcaaaccttgggatggtaaggatgctaaagacatgccaatcttgattaaggccgtcggtaagacaactactgatcatatttctatggctggtccatggttgaaatacagaggtcatttagaaaacatttctaataactatatgattggtgctattaatgctgaaaacaagaaggctaactgtgttaaaaatgtatatactggtgaatacaaaggtgttccagacactgctagagattacagagaccaaggtatcaagtgggttgttattggtgatgaaaactttggtgaaggttcctctcgtgaacacgctgctttggaaccaagattcttgggcggtttcgctatcatcacaaagtctttcgctcgtatccatgaaactaacttgaaaaaacaaggtctattgccattgaacttcaagaacccagctgactatgacaagatcaaccctgatgacagaatcgatattctgggtctagctgaattggctccaggtaagcctgtaacaatgagagttcatccaaagaatggtaagccatgggatgctgtgttgacccatactttcaacgatgagcaaattgaatggttcaaatatggttctgccttaaataaaattaaggccgatgagaagaaataa

SEQ ID NO: 154 - protein, 778 aa, Saccharomyces cerevisiae
MLSARSAIKRPIVRGLATVSNLTRDSKVNQNLLEDHSFINYKQNVETLDIVRKRLNRPFTYAEKILYGHLDDPHGQDIQRGVSYLKLRPDRVACQDATAQMAILQFMSAGLPQVAKPVTVHCDHLIQAQVGGEKDLKRAIDLNKEVYDFLASATAKYNMGFWKPGSGIIHQIVLENYAFPGALIIGTDSHTPNAGGLGQLAIGVGGADAVDVMAGRPWELKAPKILGVKLTGKMNGWTSPKDIILKLAGITTVKGGTGKIVEYFGDGVDTFSATGMGTICNMGAEIGATTSVFPFNKSMIEYLEATGRGKIADFAKLYHKDLLSADKDAEYDEVVEIDLNTLEPYINGPFTPDLATPVSKMKEVAVANNWPLDVRVGLIGSCTNSSYEDMSRSASIVKDAAAHGLKSKTIFTVTPGSEQIRATIERDGQLETFKEFGGIVLANACGPCIGQWDRRDIKKGDKNTIVSSYNRNFTSRNDGNPQTHAFVASPELVTAFAIAGDLRFNPLTDKLKDKDGNEFMLKPPHGDGLPQRGYDAGENTYQAPPADRSTVEVKVSPTSDRLQLLKPFKPWDGKDAKDMPILIKAVGKTTTDHISMAGPWLKYRGHLENISNNYMIGAINAENKKANCVKNVYTGEYKGVPDTARDYRDQGIKWVVIGDENFGEGSSREHAALEPRFLGGFAIITKSFARIHETNLKKQGLLPLNFKNPADYDKINPDDRIDILGLAELAPGKPVTMRVHPKNGKPWDAVLTHTFNDEQIEWFKYGSALNKIKADEKK

SEQ ID NO: 155 - DNA, 2718 bp, Schizosaccharomyces pombe
atgaagctttgcctttcgggctcttcgcaggcaattccatccaaaggaattagtttggttgcagctcgattccaaagcactgcttcgagggcttcctatgtgacaccgccatatgagaagttgatggggaaactccaacaagttcgcaagtttcttcctggtcaaaagctcactttggcggaaaaggtcctttattctcatttggttaaccctgaagagagcttcagtggtgtctctccttcagacattcgtggctccttgtacctcaaactgaatcccgatcgtgtagccatgcaggatgcctctgctcaaatggccttgcttcagtttatgacgtgtggtcttgaaaaaactatgattcccgctagcattcattgtgaccacttgattgttggtcatcgtggtgccaacagtgatatccccgatagcatcgccaataacaaggagatttttgattttttgcaaagtgccgctaaaaagtacggcatacagttttggggcccaggaagtggcattattcaccaaatcgtgctagaaaactatgccgctcctggtggaatgatgcttggaacagattctcatactcccaacgctggtggtttgggtatgattgccattggcgttggtggtgccgatgccgtcgatgctatgaccaatacaccatgggagttaaaagctcccaaaatcatcggtgtcaaccttacgggcgctatgtctggctggactactccaaaagaccttatacttcatttggctggtaagcttaccgttcgtggtggtaccggtcatattattgaatactttggccctggtgttgcgtccctctcttgcactggtatggctactgtttgtaatatgggcgctgaagtcggtgcaaccacctcaatctttccttataccgattctatgcgtcgctatctaattgccacacaccgtgcagaggtcgccgatgctgcgtcggaggttcatagtgaatacaactaccttgctgctgatactggggctaaatatgatcaaataattgacatcaacctttcggaacttaccccttccctcaatggtcccttcactcctgatttgagcactcctgtttcaaaatttggtgaagccattgagaaaaacaaatggcctaaaaagttgtcggctggccttatcggttcatgtaccaattcttcttaccaagatatgacttgtgttgtcgatgttgttgaacaagctatatctgctggacttaaaccaaaggttccatttttggttacaccgggtagtgagcaaattcgcgcaaccattgaacgtgatggcattactgaacgcttggaagaagctggcgctactgtgctggcaaacgcatgtggtccatgcattggtatgtggaagcgtaccgatgacattgcttcaggcgagccaaatgctattcttacaagtttcaatcgtaatttccgctctcgtaatgacggaaatccatcgactatgaacttcttgaccagtcccgtaattgtggctgccaagattttttcctctgatcttgcatttgatcccacgcatgatacattgcaaacacccgatggtaaagccttcaagtttagaccccctcagggcgtcgagcttccttcggctggattcatcgctggtgactcttcctacattcctgagcctaatcctcagcctgttccggaaaccgaagttacaatcgatcccaaatctgatcgtttggaggcccttgaaccctttgagccttaccaaggaggagaaatggaaaaccttaaggttgcagtgaaggtcaaggggaagtgtactaccgatcatatttctgccgctggtaaatggttaaaatacaaaggccatcttagcaacatttgtaacaacacacttattggtgcaatgaatgctgctactggagaagtcaatcgtgcctatgacaatggcaaaggcatgacaattcctgagctgatgtggaagtggaagaaggatggacaaccttggttggtagtagctgaacataactatggtgagggttctgctcgtgagcatgcagctttgcaaccccgtgccatgaatggtcgtattattttgaccaaatcatttgcccgtattcatgagactaatttgaagaagcaaggcgttttgcctttaaccttcgtcaatgaagccgactatgaaaagatagatgcagaggataaggtttccactcgtggtattgaacaacttttagaaggtgttttggaccagcctattacccttgtcgtcactaagaaagacggttcagttgtagagattccttgcaaacacacaatgagtaaagaccagatagaatttttcaaggccggttcagctcttaatttgattcgcgaaaaggcccattctggcgtggtaaatcaaaaggttatagattcaataaaacaacaacctgaccactatgctgatgcgtatatatttaatcgtcattttgttatagccaaaggagatcaactaggattgccttttcacttgaaaggtgtccaggttggtgatacgatacgacttgataaaatcgcttccttcggctcaagagattttactctctttggtaacccgtatgtagacccttcattgtttacgattgaagcggttgtattatcattccctaaaagcgcattaagtgttcgagtaaaacacaagcgtcgtcatcgtcatgatcgtgtaatgaaacataaacaaacgtatactattttaaggtaa

SEQ ID NO: 156 - protein, 905 aa, Schizosaccharomyces pombe
MKLCLSGSSQAIPSKGISLVAARFQSTASRASYVTPPYEKLMGKLQQVRKFLPGQKLTLAEKVLYSHLVNPEESFSGVSPSDIRGSLYLKLNPDRVAMQDASAQMALLQFMTCGLEKTMIPASIHCDHLIVGHRGANSDIPDSIANNKEIFDFLQSAAKKYGIQFWGPGSGIIHQIVLENYAAPGGMMLGTDSHTPNAGGLGMIAIGVGGADAVDAMTNTPWELKAPKIIGVNLTGAMSGWTTPKDLILHLAGKLTVRGGTGHIIEYFGPGVASLSCTGMATVCNMGAEVGATTSIFPYTDSMRRYLIATHRAEVADAASEVHSEYNYLAADTGAKYDQIIDINLSELTPSLNGPFTPDLSTPVSKFGEAIEKNKWPKKLSAGLIGSCTNSSYQDMTCVVDVVEQAISAGLKPKVPFLVTPGSEQIRATIERDGITERLEEAGATVLANACGPCIGMWKRTDDIASGEPNAILTSFNRNFRSRNDGNPSTMNFLTSPVIVAAKIFSSDLAFDPTHDTLQTPDGKAFKFRPPQGVELPSAGFIAGDSSYIPEPNPQPVPETEVTIDPKSDRLEALEPFEPYQGGEMENLKVAVKVKGKCTTDHISAAGKWLKYKGHLSNICNNTLIGAMNAATGEVNRAYDNGKGMTIPELMWKWKKDGQPWLVVAEHNYGEGSAREHAALQPRAMNGRIILTKSFARIHETNLKKQGVLPLTFVNEADYEKIDAEDKVSTRGIEQLLEGVLDQPITLVVTKKDGSVVEIPCKHTMSKDQIEFFKAGSALNLIREKAHSGVVNQKVIDSIKQQPDHYADAYIFNRHFVIAKGDQLGLPFHLKGVQVGDTIRLDKIASFGSRDFTLFGNPYVDPSLFTIEAVVLSFPKSALSVRVKHKRRHRHDRVMKHKQTYTILR

SEQ ID NO: 157 - DNA, 2337 bp, Schizosaccharomyces pombe
atgggctcgcgtatttttacgcaatccaccctcagaagcttttcatgcgctcctgtcgcagccaacattgacgctaaaaaggttgccatgagcaactttgaaaaaaataaatttattaattatcagcgcatcaaagacaatctcgagattgttaagaagcgcttaaaccgtcctctcacatattcagaaaaaatcctttacggtcacttggacgatcccgtaaatcaggatattgaacgtggtgtctcttacttgaagcttcgtcctgatcgtgttgcttgtcaggatgccactgcacaaatggctatccttcaatttatgtccgcgggtatgccggaggtcgctgtccccgtcactgtccattgtgaccacttgatcgaagcctacgaaggtggtcctatcgatctcgaacgtgccaacgttaccaataaggaggtttacgactttttacaaaccgcttgtgccaaatacaacataggcttttggcgccctggttcgggtatcattcatcaaatcgtccttgaaaactatgccttccccggtggtttgttgattggtactgattctcacactcccaacgccggtggtctcggaatggtcgctataggtgttggtggtgctgacgctgtcgatgttatggccaatttgccttgggagttgaagtgtcctaaagtcatcggtgttaagctcactggtcaattaaagggttggacttctcccaaggacgttatcttaaaggttgctggtattcttaccgtcaaaggtggtaccggtgccattgttgagtactttggtcccggtgttgaatctctttcttgcactggtatgggtacgatctgtaacatgggtgctgaaatcggcgctactacctctatcttcccatttaaccctcgtatgtccgagtaccttcgtgccaccaaccgttccgctattgctgattatgctgaagaattcgcccctatcattgccgctgatgaaaatgctcactatgaccaaattattgaaattgatttgaacacattggaaccccatttgaacggtccctttacccccgatttggctaccccaatttccaagttcaaggaagccgtcaagaagaatgattggcctcaagagctcaaagttggtttgattggatcttgtactaactcctcctatgaggatatgtctcgtgctgcctccatttgccaacaagccatcgacaagggcattaaaaccaaatctttgtttaccatcacacccggttccgaacaagttcgtgctactttgactcgcgatggtcagttggacacaatgagaaaggctggtggtattgttttggctaacgcttgcggtccctgtatcggtcagtggaagcgtaccgatgttaagaagggagagaagaactcaatcgtcacctcttacaaccgtaacttcactggtcgtaacgatgctaaccctgccactcatgcttttgtaacctcccccgatattgttactgccatggttttctctggtgacatgaactttaaccctcttactgatactttgaaagataaggatggaaacgactttaagtttgaacctcctaccggtgctggtcttccttccaagggttacgacccaggaagcaacacttatgttgcacctagctcggtcaatgtcaaggatgtcgccattgatcctcattcgaagcgtttacaacgccttactcccttcaagaaatgggatggaaaggatatgaagggtttgaaaatccttatcaaggctaagggcaagtgtactactgatcatatctctgccgctggtccttggttgaagtaccgtggacatcttcaaaacatttctaataactatatgattggtgctattaatgctgaaaacggtgaagcaaataagttgaaggatcaactcaccggtgaatacaagactgtccccaacgttgctattgattatcgtgatcatggaatccgttgggttaccttgggtgaacaaaattttggtgaaggatcttctcgtgagcatgctgctctcgaacctcgttatttgggaggcgccgctgttatcaccaaatcttttgcccgtatccacgaaaccaatcttaaaaagcaaggtttgttgcctttgacttttgccgatcccgcagcttatgacaagatttctcctttcgacaccgtcgatatcgatggtctcactacctttgctcccggtaagcctttaactttggttgttcaccctgctgatggatctgctgagtggtctaccaaacttaaccatacctttaacaaggatcaaattgaatggttcaaggccggtagtgctttgaatcacatggcaaacatgcacaagcaaaagtaa

SEQ ID NO: 158 - protein, 778 aa, Schizosaccharomyces pombe
MGSRIFTQSTLRSFSCAPVAANIDAKKVAMSNFEKNKFINYQRIKDNLEIVKKRLNRPLTYSEKILYGHLDDPVNQDIERGVSYLKLRPDRVACQDATAQMAILQFMSAGMPEVAVPVTVHCDHLIEAYEGGPIDLERANVTNKEVYDFLQTACAKYNIGFWRPGSGIIHQIVLENYAFPGGLLIGTDSHTPNAGGLGMVAIGVGGADAVDVMANLPWELKCPKVIGVKLTGQLKGWTSPKDVILKVAGILTVKGGTGAIVEYFGPGVESLSCTGMGTICNMGAEIGATTSIFPFNPRMSEYLRATNRSAIADYAEEFAPIIAADENAHYDQIIEIDLNTLEPHLNGPFTPDLATPISKFKEAVKKNDWPQELKVGLIGSCTNSSYEDMSRAASICQQAIDKGIKTKSLFTITPGSEQVRATLTRDGQLDTMRKAGGIVLANACGPCIGQWKRTDVKKGEKNSIVTSYNRNFTGRNDANPATHAFVTSPDIVTAMVFSGDMNFNPLTDTLKDKDGNDFKFEPPTGAGLPSKGYDPGSNTYVAPSSVNVKDVAIDPHSKRLQRLTPFKKWDGKDMKGLKILIKAKGKCTTDHISAAGPWLKYRGHLQNISNNYMIGAINAENGEANKLKDQLTGEYKTVPNVAIDYRDHGIRWVTLGEQNFGEGSSREHAALEPRYLGGAAVITKSFARIHETNLKKQGLLPLTFADPAAYDKISPFDTVDIDGLTTFAPGKPLTLVVHPADGSAEWSTKLNHTFNKDQIEWFKAGSALNHMANMHKQK

SEQ ID NO: 159 - DNA, 2367 bp, Kluyveromyces lactis
atgttgtctgctcgtgttgccttgaagaagcaaggagtcgttagacaaggagtcatcagacacttggctaccggagtctctagtactatgactagagactctaaagttcatcaaaatttgttggaagaccattccttcattaactataaacaaaacattgagtatgtcaatatcgtcagagaaagactaggacgtccattgacatacgcagaaaagattttgtacggtcatttggatgatcctcatggtcaagaaatcgaaagaggtgtttcttatttgaaattgagaccagatcgtgttgcttgtcaagatgctaccgctcaaatggctatcttgcaattcatgtcagcaggtttacctcaagttgctaagccattgactgttcactgtgaccatttgattcaagctcaaattggtggtgaaaaggatttgaagagagccattgatatcaacaaggaagtttacgatttcttggctactgctactgctaaatataatatgggtttctggaagccaggttccggtattatccatcaaatcgttttggaaaactatgctttcccaggtgctttgattattggtaccgattcgcatactccaaatgctggtggtctaggtcaattggctattggtgttggtggtgctgatgctgtcgatgtcatgtccgatttggcatgggaattgaaggctccaaagattatgggtgttaagttgaccggtagaatgaacggttggacttctccaaaggatattattctaaagttggctggtatcactaccgtcaaaggtggtactggtaagattgttgaatatttcggtgacggtgttgacactttcagtgctactggtatgggtaccatctgtaatatgggtgctgaaatcggtgccactacatccgttttcccattcaacaagtctatgattgactatttggatgctactggtagagacaagattgctcaattcgctcaattgtaccacaaggatttgttgtccgctgatgaaggtgctgagtacgatgaaatcatcgaaatcgatttgaacactttggaaccatatgtcaatggtccattcactccagatttggctactccaatctctaagatgaaggatgtcgctgtcaagaacaactggcctctagaagttaaagtcggtcttatcggttcttgtaccaactcttcttacgaagatatgtccagagctgcttccgtcgttaaggatgctgctacccacggtctaaaatctaagtctatcttcactgtgactccaggttctgaacaaatcagagctaccatcgctagagatggtcaattggaaactttcaaagaattcggtggtaccgttttggctaacgcttgtggtccatgtatcggtcaatgggacagacaagatatcaagaagggtgacaagaacaccattgtttcctctttcaacagaaacttcactgctagaaacgatggtaacccagatactcactccttcgttgcctctccagaaatcactaccgctttcgccattgctggtgatttgagatttaaccctctaaccgacactttgaaggacaaggacggtaacgaattcatgttgaaaccaccaactggtgttggtttgccagttaagggttacgacccaggtgaaaacacttaccaagctccaccaaaggaccgttcttccgttactgtccaagtttctccaacgtctgaccgtctacaattgttgaaacctttcaaggcttgggatggtaaggatgctttcgatatgccaatcttgatcaaatctctaggtaagaccaccactgaccatatctctatggctggtccatggttgaagtacagaggtcatttggaaaacatttcaaacaactatatgattggtgctattaacgctgaaaacaagaaggctaactgtgtcaagcaccactacactggtgaatacgccggtgttccagacactgctagagcttacagagatgcaggtatcagatgggttgtcattggtggtgaaaacttcggtgaaggttcttctcgtgaacacgctgccttggaaccaagattcttgggtggtttcgctattattaccaaatccttcgcaagaattcacgaaactaacttgaagaaacaaggtatgttgcctttgaactttgctgaaccagctgcttacgacaagatcaacccagatgacaccatcgacatcttgggtttgactactctagctccaggtaagaacttgatcatgagagttcatccaaaggaaggtgaagcttgggaaaccccattgtctcacactttcaacgctgaacaaatcgaatggttcaaggccggttctgctttgaacagattggctaacgccaagaaggctaagaactga

SEQ ID NO: 160 - protein, 788 aa, Kluyveromyces lactis
MLSARVALKKQGVVRQGVIRHLATGVSSTMTRDSKVHQNLLEDHSFINYKQNIEYVNIVRERLGRPLTYAEKILYGHLDDPHGQEIERGVSYLKLRPDRVACQDATAQMAILQFMSAGLPQVAKPLTVHCDHLIQAQIGGEKDLKRAIDINKEVYDFLATATAKYNMGFWKPGSGIIHQIVLENYAFPGALIIGTDSHTPNAGGLGQLAIGVGGADAVDVMSDLAWELKAPKIMGVKLTGRMNGWTSPKDIILKLAGITTVKGGTGKIVEYFGDGVDTFSATGMGTICNMGAEIGATTSVFPFNKSMIDYLDATGRDKIAQFAQLYHKDLLSADEGAEYDEIIEIDLNTLEPYVNGPFTPDLATPISKMKDVAVKNNWPLEVKVGLIGSCTNSSYEDMSRAASVVKDAATHGLKSKSIFTVTPGSEQIRATIARDGQLETFKEFGGTVLANACGPCIGQWDRQDIKKGDKNTIVSSFNRNFTARNDGNPDTHSFVASPEITTAFAIAGDLRFNPLTDTLKDKDGNEFMLKPPTGVGLPVKGYDPGENTYQAPPKDRSSVTVQVSPTSDRLQLLKPFKAWDGKDAFDMPILIKSLGKTTTDHISMAGPWLKYRGHLENISNNYMIGAINAENKKANCVKHHYTGEYAGVPDTARAYRDAGIRWVVIGGENFGEGSSREHAALEPRFLGGFAIITKSFARIHETNLKKQGMLPLNFAEPAAYDKINPDDTIDILGLTTLAPGKNLIMRVHPKEGEAWETPLSHTFNAEQIEWFKAGSALNRLANAKKAKN

SEQ ID NO: 161 - DNA, 2376 bp, Candida Albicans
atgttaagagctagatcagtattaagtgggagtgtgtcgagacgtgcgttagccactcaagcatttaacttttcagttcctccagaatatcaatcgaggactccaccatattctaaattgatcaacaacttatcgacggttaagaaaatattgaaaaaccaaccattgacattagcagagaagatattgtattcacatttatgcaatccagaagaaagtcttacttcatccaatgtaagtgatataaggggccaacaatatttgaagttgcacccagatagagtggccatgcaagatgcttctgcccagatggcattgttacaatttatgacatgtggtatgagttccacagcagttccagcctcaattcactgtgaccatttgattgttggtaaagatggtgctgaggaagatttagttaaatcaatagcaacaaataaagaggtttttgatttcttgcaaagttgtggtgaaaaatacggtattcaattttggggaccaggatctggtatcattcatcaaattgttttagagaactttgccgcacctggtttaatgatgttaggtaccgattcgcatactcctaatgcagggggtttgggtgcaattgccattggtgttggtggtgcagatgctgttgatgcattgacaggtaccccttgggaattgaaagcaccaaagattttgggtgtgaaattaactggcaaattatctggatggagctcgcctaaagatgtaattactactttagcaggtattttgaccgtcagaggaggtactggttatatcgtggaatactttggtgatggtgttaaaacattatcatgtactggtatggctactatctgtaatatgggtgccgaaattggtgccaccacctcgactttcccataccaagaagcccacaagagatatttgattgacacgcatagagcaccaattgccgaagctgctgattcggtgaattccgaattcaaatttttgcaagctgatgaaggtgccgaatacgacaaagtcattgagataaatctttctgaattagaaccacatgtgaacgggcctttcactccagatttgtctactccaatttccaaatttggtgagaccgcccaaaaggaaggttggcctgaaacagtttccgctgggttgattggttcatgtactaattcttcgtaccaagatatgtcccgtgctgtttctatcattaaacaggctgaagcagttggattaaaaccaaaaattccattctttgttacaccaggatccgaacaaatcagagccacaattgaaagagatggtttgataaacacttttgaaagcaatggggccatagtgttggctaatgcatgtggaccatgtattggtcaatgggacagaactgatgttccaaagacatcaacagacttcaacgccattttcacttcattcaacaggaatttccgtgccagaaacgatggtaacagaaacaccatgaactttttaacctctccagatatggttacggccatgatatattccggagatatgaatttcaacccagtgacagattcaatcgaattaccaaatggtaaagagttcagattccaaccaccccaaggtaaagatttgccacaatctggattcatcccaggtcgttctgagttctaccccgaagcaaacccacaaccaaaaccagaggttgaagtcaatgtgtccccaagttcagacagattacaacttttggaacctttccaaccatggtccggtgaagaattgtcaaccacagtattgttgaaagttgaaggaaaatgtactaccgatcatatttcggcagctggtgtctggttgaaatacaaaggtcatttggaaaacatttcatacaatacattaattggtgcagttaacaaagaaacgggtgaagttaacaaggcttatgatttgaacggtgacgcatacggtattcctgaattgatgattaaatggaaggatgaatctagaccgtgggttgtggtagccgaacataactatggtgaaggttctgctagagaacatgctgccttgtcacctcgtttcttgggaggctcagtgattttggtgaaatcttttgctagaatccacgaaaccaacttgaagaaacaaggaatgttgcctttaacttttgcagatgaagctgattatgacaaaatttcatctggcgatttattgacaactatagatttgaaagatatgattgccaaggacggtaacaacggaggtactttacgtgttaaggttaccaaaagagatggttctgaatttgaaattttagctaaacatacaatgtctaaagaccaagttgagttcttcaaagctggttctgccatcaactacatcggtaacacaaaaaagggattgtaa

SEQ ID NO: 162 - protein, 791 aa, Candida Albicans
MLRARSVLSGSVSRRALATQAFNFSVPPEYQSRTPPYSKLINNLSTVKKILKNQPLTLAEKILYSHLCNPEESLTSSNVSDIRGQQYLKLHPDRVAMQDASAQMALLQFMTCGMSSTAVPASIHCDHLIVGKDGAEEDLVKSIATNKEVFDFLQSCGEKYGIQFWGPGSGIIHQIVLENFAAPGLMMLGTDSHTPNAGGLGAIAIGVGGADAVDALTGTPWELKAPKILGVKLTGKLSGWSSPKDVITTLAGILTVRGGTGYIVEYFGDGVKTLSCTGMATICNMGAEIGATTSTFPYQEAHKRYLIDTHRAPIAEAADSVNSEFKFLQADEGAEYDKVIEINLSELEPHVNGPFTPDLSTPISKFGETAQKEGWPETVSAGLIGSCTNSSYQDMSRAVSIIKQAEAVGLKPKIPFFVTPGSEQIRATIERDGLINTFESNGAIVLANACGPCIGQWDRTDVPKTSTDFNAIFTSFNRNFRARNDGNRNTMNFLTSPDMVTAMIYSGDMNFNPVTDSIELPNGKEFRFQPPQGKDLPQSGFIPGRSEFYPEANPQPKPEVEVNVSPSSDRLQLLEPFQPWSGEELSTTVLLKVEGKCTTDHISAAGVWLKYKGHLENISYNTLIGAVNKETGEVNKAYDLNGDAYGIPELMIKWKDESRPWVVVAEHNYGEGSAREHAALSPRFLGGSVILVKSFARIHETNLKKQGMLPLTFADEADYDKISSGDLLTTIDLKDMIAKDGNNGGTLRVKVTKRDGSEFEILAKHTMSKDQVEFFKAGSAINYIGNTKKGL

SEQ ID NO: 163 - DNA, 2373 bp, Yarrowia lipolytica
atgctgagaagtgctcgattttgccaggcacgattctcggccatcaaggctcgtggtcttgccaccaccgccaacgcctccggcctcagcgtgcccgctgacttcaagacccgaacccctccctacgcggagctcatcaaccgtcttgatcaggtcaagaagattatcaaccgaaatgatttgaccttggctgaaaaaattctgtattcacatcttcacaaccctgaggagactcccagcatcactcgaggtgacacttacctcaagctcaaccccgaccgagtggccatgcaggatgcctctgctcagatggctctgttgcagtttatgacctgtggtcttccttccaccgccgtgcctgcgtccattcactgtgaccatctgattgttggccgagacggtgccgatgatgatctgacccgatctatcgctaccaaccaggaggtgttcgacttcctgcagcaatgtgccgagaagtacggcatccagttctggggccccggatccggtatcatccaccagattgtgctggagaacttctctgttcccggtctcatgatgctcggaaccgactctcacactcccaacgctggtggtctcggtgccattgccatcggtgttggaggagccgacgctgtcgacgctttgaccggaactccctgggaactgaaggcccccaagattctcggagtcaagctgactggaaagctgtccggctgggcttctcccaaggatgttattacccatctggctggcaagctgactgtgcgaggaggaaccggaaacatcatcgagtaccacggcgagggtgttgactccctgtcctgcaccggtatggccacaatttgcaacatgggtgccgaggtcggtgctaccacctctacgttcccctttacggagtccatgcgacgatacttggaggccaccggacgagctcccattgccgcagcagcagctgctgctcgagaccgaggcttcttggctgctgacgagggtgctcagtatgacgaggttgtagaggtcaacctgtccgagctcgagccctgtatcaacggtcccttcactcccgatctggccacccccctctccaagtactccaccaaggtcacctctgagaagtggcccgataccgtgtctgccggtctcattggatcatgcaccaactcctcctacgaggacatgacccgagtcgcctctctggttgagcaggcccgagacaacggtctcgaggccaagattcccttcttcatcacccccggatccgagcagattcgagccaccatcaagaaggacggtctgacagacgtgttcgagtctgctggtgcggtggttctggccaacgcctgtggaccctgtatcggtcagtgggatcgaactgacgagaccaagcccggcgagttcaactccatcttcacctctttcaaccgaaacttccgagcccgaaacgatggtaaccccgaaaccatgaacttcctgacctctcccgagattgtcaccgctatgatctactctggagacgctcacttcaaccccatgaccgactccatcaccaccaaggacggcaaggaattcaagttccagccccctaagggtaccgagctgcccgaggagtttgccaagggccgacccgagttctaccccgaggctgccccccagccccatcccgaggtgaacgtgactgtctcccccgattccgagcgactgcagctccttgagccttttgagccctttaacaaccaggagctcaagctctcggtactcatgaaggttgagggcaagtgcaccaccgaccacatttcggccgctggtgcctggctcaagtacaagggccatcttgagaacatttcctacaacaccctgattggtgctcttaacaaggagacccagaaggtcaaccacactattgatgccgctgacggctccgagcagtctatccccgacctcatgatcaagtggaaggagcagggcaagccctggattgttgttgctgagcacaactacggagagggttccgcccgagagcatgctgctctgtctccccgattcctcggtggacaggccatcctagtcaagtctttcgctcgaattcacgagaccaacctcaagaagcagggtatgcttcctctgacctttgagaacgaggccgactacgacaagatccaggcctgcgacactctggagaccctggacctcctggacatgcttgagaagggtggtgacaacggtggctttgtccagatgcgagctaccaagtctgacggctctacctacgacttccgagcccgacacaccatgtctgccgaccaggttgatttcttcaaggctggttctgccatcaacttcattggagcccagaaggctgccaacaagtaa

SEQ ID NO: 164 - protein, 790 aa, Yarrowia lipolytica
MLRSARFCQARFSAIKARGLATTANASGLSVPADFKTRTPPYAELINRLDQVKKIINRNDLTLAEKILYSHLHNPEETPSITRGDTYLKLNPDRVAMQDASAQMALLQFMTCGLPSTAVPASIHCDHLIVGRDGADDDLTRSIATNQEVFDFLQQCAEKYGIQFWGPGSGIIHQIVLENFSVPGLMMLGTDSHTPNAGGLGAIAIGVGGADAVDALTGTPWELKAPKILGVKLTGKLSGWASPKDVITHLAGKLTVRGGTGNIIEYHGEGVDSLSCTGMATICNMGAEVGATTSTFPFTESMRRYLEATGRAPIAAAAAAARDRGFLAADEGAQYDEVVEVNLSELEPCINGPFTPDLATPLSKYSTKVTSEKWPDTVSAGLIGSCTNSSYEDMTRVASLVEQARDNGLEAKIPFFITPGSEQIRATIKKDGLTDVFESAGAVVLANACGPCIGQWDRTDETKPGEFNSIFTSFNRNFRARNDGNPETMNFLTSPEIVTAMIYSGDAHFNPMTDSITTKDGKEFKFQPPKGTELPEEFAKGRPEFYPEAAPQPHPEVNVTVSPDSERLQLLEPFEPFNNQELKLSVLMKVEGKCTTDHISAAGAWLKYKGHLENISYNTLIGALNKETQKVNHTIDAADGSEQSIPDLMIKWKEQGKPWIVVAEHNYGEGSAREHAALSPRFLGGQAILVKSFARIHETNLKKQGMLPLTFENEADYDKIQACDTLETLDLLDMLEKGGDNGGFVQMRATKSDGSTYDFRARHTMSADQVDFFKAGSAINFIGAQKAANK

SEQ ID NO: 165 - DNA, 2343 bp, Pichia stipitis
atgttatctagaactgctgtcagagccccacgctctatccgtgggttggccactgctggcttgaccagagactcccaagtgaaccagaacttgttggaatctcactctttcatccaatacaagaagcaactcgagaacctcgacatcgtcaaggccagattgaacagacctttgacttatgccgaaaagcttctctacggtcacttggacgaccctcacggacaagacatccagagaggtgtctcctacttgaagttgagaccagatcgtgtcgcttgtcaagatgccaccgctcaaatggccattttgcaattcatgtctgccggtttgcctcaagttgccactccttccactgtccactgtgaccatttgatccaggcccaaattggtggtgctaaggatttggccagagctattgacttgaacaaggaagtgtacgacttcttgtcgactgcctgtgccaaatacaacttgggtttctggaagcccggttccggtatcatccatcagatcgtattggaaaactacgccttcccaggtgctttgttgatcggtaccgattcgcacactcctaatgctggtggtttgggtcaattggctattggtgtaggtggtgctgatgccgtcgacgtcatggccgacttggcctgggaattgaaggctccaaagatcattggtgtcaagttgaccggtagaatgtccggctggacctcgccaaaggatatcatcttgaagttggctggtatcaccactgtcaagggtggtaccggttccattgttgaatacttcggttctggtgttgaaaccttctcctgtaccggtatgggtaccatctgtaacatgggtgccgaaattggtgctaccacctctgtcttcccattcaacaactccatggttgactatttgaatgccactggtagatccaacattgccgagtttgccaacttgtacaagaaggactacttgtctgccgacgaaggctgtgaatacgaccaagtcattgaaatcgacttgaacaccttggaaccacacattaacggtcctttcaccccagatttggctactccagtctccaagatgaaggaaactgccatcaagaacggctggccattggaagtcaaggttggtttgattggttcttgtaccaactcttcttacgaagatatgaccagagctgcttctattattgaagacgctgccacccatggcttgaagtccaaggctatctacactgtttctcctggttctgaacaagtcagagccaccattgccagagacggtcaattgaagaccttcgaagactttggcggtgttgtcatggccaacgcctgtggtccatgtatcggtcaatgggacagacaagacattaagaagggtgacaagaacaccattgtgtcttctttcaacagaaatttcactgctagaaacgacggtaatccagccactcacgctttcgtcgcttctccagaaatgaccactgctttcgccatctccggtgacttgggtttcaacccaattaccgacaccttgaaggacgctaacggaaacgagttcaagttgaaggaaccagttggtgttggtttaccagttaacggctacgaccctggtgaaaacacctaccaagctccacctgaagacagatcaacagtccaagtgcaaattgccccaacctccgacagattacaaaagttgactcctttcaagccatgggacggtaaggatgccgaaagattaccaatcttaatcaaggccgttggtaagaccacaaccgatcatatttctatggccggtccatggttgaagtaccgtggtcacttggaaaacatctccaacaactacatgattggtgctatcaacgctgaaaacggtgaagccaacaacgtcaagaaccactacactggtgtatactctggtgttccagacactggtgctgcttacagagatgctggccacaagtgggttgttattggtgacgaaaacttcggtgaaggttcttccagagaacacgctgccttggaaccaagattcttgggtggtttcgctatcatcaccaagtccttcgctcgtattcacgaaaccaacttgaagaagcaaggtttgttaccattgaacttcactgacgttgctgcctacgacaaaatccaaccagaagacgaagtagacttgctcggtttgactgaattggcccctggcaagaacgttattctcagagtccacccagctgacggttctgccacctgggaaaccgaattgtctcacacttacaacattgaacaaattgaatggttcaagtacggttccgctttgaacaagatggctgccgttgctgctgaaaagaagtaa

SEQ ID NO: 166 - protein, 780 aa, Pichia stipitis
MLSRTAVRAPRSIRGLATAGLTRDSQVNQNLLESHSFIQYKKQLENLDIVKARLNRPLTYAEKLLYGHLDDPHGQDIQRGVSYLKLRPDRVACQDATAQMAILQFMSAGLPQVATPSTVHCDHLIQAQIGGAKDLARAIDLNKEVYDFLSTACAKYNLGFWKPGSGIIHQIVLENYAFPGALLIGTDSHTPNAGGLGQLAIGVGGADAVDVMADLAWELKAPKIIGVKLTGRMSGWTSPKDIILKLAGITTVKGGTGSIVEYFGSGVETFSCTGMGTICNMGAEIGATTSVFPFNNSMVDYLNATGRSNIAEFANLYKKDYLSADEGCEYDQVIEIDLNTLEPHINGPFTPDLATPVSKMKETAIKNGWPLEVKVGLIGSCTNSSYEDMTRAASIIEDAATHGLKSKAIYTVSPGSEQVRATIARDGQLKTFEDFGGVVMANACGPCIGQWDRQDIKKGDKNTIVSSFNRNFTARNDGNPATHAFVASPEMTTAFAISGDLGFNPITDTLKDANGNEFKLKEPVGVGLPVNGYDPGENTYQAPPEDRSTVQVQIAPTSDRLQKLTPFKPWDGKDAERLPILIKAVGKTTTDHISMAGPWLKYRGHLENISNNYMIGAINAENGEANNVKNHYTGVYSGVPDTGAAYRDAGHKWVVIGDENFGEGSSREHAALEPRFLGGFAIITKSFARIHETNLKKQGLLPLNFTDVAAYDKIQPEDEVDLLGLTELAPGKNVILRVHPADGSATWETELSHTYNIEQIEWFKYGSALNKMAAVAAEKK

SEQ ID NO: 167 - DNA, 2358 bp, Candida glabrata
atgtttagagctgtcggtagaagaaacctggctacagttagtcgaaatatcccctctgttccggagaatttgagagcatacactccaccttatgctaaattactaaataacttggacaaagttaagcaaatactgaacaatgaaccattgaccttggctgaaaagattctgtactcacatctgtgtaaccccgaagaatctcttacgtcctctagagtcgcagacatcagaggccagaagtacttgaaattgaatcctgatagagtcgccatgcaagacgcctctgcacaaatggctcttttgcagttcatgaccactggcctatcagaaactgctgttccagcatcgatccactgtgatcatttaattgtcggaaaagatggtgaaaccaaggatttgagaaactccattaagaccaaccaggaagtttttgatttcctggagagctgtgcgaagagatacggcatacagttctggggtcctggttccggtattatccatcaaatcgtgctggagaacttctccgcgcctggtttgatgatgctaggtacagactcacacactccaaacgctggtggtctaggtgccatcgctattggtgttggtggtgctgatgccgtggacgccttaactggaaccccatgggaattaaaggcaccaaaggttctgggtgttaaattgaccggtaaactacacggctggtcggctccaaaggatgtcatcaccatgcttgcaggtaaactaaccgttagaggtggtacaggctacattgtcgaatattttggagaaggtgtagaaactctatcatgtaccggtatggccacaatctgtaatatgggtgctgagatcggtgctaccacatccactttcccataccaagctgcacacaagagatatctggaagccactggtagaggttttgttgctactgcagcagacgccgccttggctaactacaatttcctaagagcggatgaaggtgctcaatatgacgaagtaatagaaattaacctatccgagttagaaccacacgtaaatggccccttcactcccgacttgtcgacaccaattactaaatatgctgaaagaagtctggaagaaaaatggcctcaaaatatctccgctgcattgattggttcatgtaccaattcatcataccaagatatgagtcgtgtgatcgatttagtcaaccaagctgaaaaggctggtttgaagcctcgcattcctttctttgttactccaggatctgaagctatcagagctacattggatagagatggccttattaagaaatttgaagataatggtgccattgtgttagctaacgcatgtggtccttgtattggtcaatgggatagagaagatgttccaaaggaatcaagcgagaccaactcaatttttacctcctttaacagaaacttcagggctagaaatgatggtaacagaaacaccatgaatttcctaacctccccagaaatcgttactgctatgagctattcaggtaatgctcaattcaacccattaactgatgctattccattaccaaatggcggtgaatttagattcaatccacctgtaggtgaagaacttccttccaagggatttgaacacggtagggataaattctatccagcaggaaaattaagtgctgatccaaatgttgaagtcaaagtttctccaacctctgatcgtttacaacttttggaacctttcaaaccttggaacggtaaggaattaaggactaatgtattgatgaaggtagaagggaaatgtacaactgatcatatttcagctgcaggtgtatggttgaagtataaaggtcatctggagaatatttcctacaacactttaattggtgcacaaaacaaggaaactggcgaggtgaataaggcttatgacttagatggtactgcctatgatatccctggattgatgatgaagtggaaagaggatggtagaccatggacagttgttgctgagcacaactatggtgaaggttcagcaagagaacatgctgctttgtctccaagatacttgggtggtcaaatgatacttgtcaaatcttttgccagaatccatgagacaaacttgaagaaacaaggtatgctaccactaacatttgctgatgaggcagactatgacagaatttctggtggtgacactttggagactgtgggcctaatagatttagtagctcaagacggtaataatggcgggttcctagatgtcaaagtaactaaaccaaatggtgaaagcttcataatcaaaaccaaacacactctgtcaaaggatcaaattgacttctttaaggctggatcagctatcaacttcattggtgaacaacgtagaaaccactga

SEQ ID NO: 168 - protein, 785 aa, Candida glabrata
MFRAVGRRNLATVSRNIPSVPENLRAYTPPYAKLLNNLDKVKQILNNEPLTLAEKILYSHLCNPEESLTSSRVADIRGQKYLKLNPDRVAMQDASAQMALLQFMTTGLSETAVPASIHCDHLIVGKDGETKDLRNSIKTNQEVFDFLESCAKRYGIQFWGPGSGIIHQIVLENFSAPGLMMLGTDSHTPNAGGLGAIAIGVGGADAVDALTGTPWELKAPKVLGVKLTGKLHGWSAPKDVITMLAGKLTVRGGTGYIVEYFGEGVETLSCTGMATICNMGAEIGATTSTFPYQAAHKRYLEATGRGFVATAADAALANYNFLRADEGAQYDEVIEINLSELEPHVNGPFTPDLSTPITKYAERSLEEKWPQNISAALIGSCTNSSYQDMSRVIDLVNQAEKAGLKPRIPFFVTPGSEAIRATLDRDGLIKKFEDNGAIVLANACGPCIGQWDREDVPKESSETNSIFTSFNRNFRARNDGNRNTMNFLTSPEIVTAMSYSGNAQFNPLTDAIPLPNGGEFRFNPPVGEELPSKGFEHGRDKFYPAGKLSADPNVEVKVSPTSDRLQLLEPFKPWNGKELRTNVLMKVEGKCTTDHISAAGVWLKYKGHLENISYNTLIGAQNKETGEVNKAYDLDGTAYDIPGLMMKWKEDGRPWTVVAEHNYGEGSAREHAALSPRYLGGQMILVKSFARIHETNLKKQGMLPLTFADEADYDRISGGDTLETVGLIDLVAQDGNNGGFLDVKVTKPNGESFIIKTKHTLSKDQIDFFKAGSAINFIGEQRRNH

SEQ ID NO: 169 - DNA, 2334 bp, Candida glabrata
atgttgtctgctagaacagtggtgagaaacactggtgtcaggagactggctacagtctctaacttgactagagactctaaggtcaaccagaacttgttggaggaccattctttcatcaattacaagcaaaacatcgagtatgtcgacatagtgagaaagaggctaggcagaccattgacctacgctgaaaagatcctgtacggtcacttggacgacccacacggacaacagatcgagagaggtgtttcctatttgaagctaagaccagaccgtgtcgcatgtcaggatgctaccgcccaaatggccatcttgcaattcatgtccgctggcttgccagaagtagctagaccagtcacagtccactgtgaccacttgatccaagcccaaattggtggtgagaaggatttgaagagagccgtcgacctaaataaggaagtctacgacttcttggcttctgcctccgctaagtacaacatcggtttctggaagccaggttctggtattatccaccaaattgttctagaaaactacgctttcccaggtgctttgatcatcggtaccgactcccacactccaaacgctggtggtctaggtcaattggctatcggtgtcggtggtgctgatgccgtcgatgtcatggctggtctaccatgggaactaaaggctccaaagattttgggtgttaagttgaccggtagaatgaacggttggacctctccaaaggatatcatcttgaagttggctggtattacaactgtcaagggtggtactggtaagatcgtcgaatacttcggtgaaggtgttgacactttctccgccactggtatgggtactatctgtaatatgggtgctgaaatcggtgctaccacttccgttttcccattcaacaagtctatgattgactacttgaaggctactcgtcgtgacaagatcgccgaattcgctcaattgtaccacaaggatctattgtccgctgaccaaggtgctgaatacgatgaagtcattgaaattgacttgaacactctagaaccatacgttaacggtccatttaccccagatttggccactccaatctctaagatgaaggaagttgctgtcgaaaacaattggccattggaagtcaaggtcggtttgatcggttcctgtactaactcttcttacgaagatatgtctcgttccgcttctatcatcaaggatgctgcctctcacggtttgaaggctaagtccatcttcacagttaccccaggttctgaacaaattagagccaccattgaacgtgatggtcaattggaaactttcaaggaattcggtggtattgtcttggctaacgcctgtggtccatgtattggtcaatgggaccgtcaagacatcaagaagggtgacaagaacactattgtctcttcttacaacagaaacttcacttccagaaacgatggtaacccacaaacccacgctttcgttgcttctccagaaattgttactgctttcgccattgccggtgacttgagattcaacccattgactgacaagttgaaggacaaggatggtaacgaattcaagttgaaggaaccattcggtaacggtttgccagaacgtggttacgacccaggtgagaacacttaccaagctccaccaaaggaccgtaacgctgttgatgttaaggttgctccaacctccgaccgtctacaagtcctaaagcctttcaagccatgggatggtaaggatgctctaaacatgccaatcttgatcaagtctttgggtaagaccaccactgaccatatctctatggccggtccatggttgaagtacagaggtcacttggaaaacatttctaacaactacatgattggtgctatcaatgctgaaaacaagaaggccaacagtgttagaaacgtctacactggtgaatacaagggtgttccagacactgccagagactacagagacgaaggtattaagtgggttgttattggtgatgagaacttcggtgaaggttcttctcgtgaacacgctgctttggaaccaagattcttgggtggtttcgctatcattactaagtcatttgctcgtatccacgaaactaacttgaagaagcaaggtttgttgccattgaacttcaagaacccagctgactacgacaagattaacccagatgacaagattgatattctaggattgaccgagcttgctccaggtaagaacgtcaccatgagagttcatccaaagaacggtgaagcttgggactgtgagttgactcacactttcaacagcgagcaaatcgaatggttcaagtacggttctgctctaaacaagattaaggctgacaaagcttaa

SEQ ID NO: 170 - protein, 777 aa, Candida glabrata
MLSARTVVRNTGVRRLATVSNLTRDSKVNQNLLEDHSFINYKQNIEYVDIVRKRLGRPLTYAEKILYGHLDDPHGQQIERGVSYLKLRPDRVACQDATAQMAILQFMSAGLPEVARPVTVHCDHLIQAQIGGEKDLKRAVDLNKEVYDFLASASAKYNIGFWKPGSGIIHQIVLENYAFPGALIIGTDSHTPNAGGLGQLAIGVGGADAVDVMAGLPWELKAPKILGVKLTGRMNGWTSPKDIILKLAGITTVKGGTGKIVEYFGEGVDTFSATGMGTICNMGAEIGATTSVFPFNKSMIDYLKATRRDKIAEFAQLYHKDLLSADQGAEYDEVIEIDLNTLEPYVNGPFTPDLATPISKMKEVAVENNWPLEVKVGLIGSCTNSSYEDMSRSASIIKDAASHGLKAKSIFTVTPGSEQIRATIERDGQLETFKEFGGIVLANACGPCIGQWDRQDIKKGDKNTIVSSYNRNFTSRNDGNPQTHAFVASPEIVTAFAIAGDLRFNPLTDKLKDKDGNEFKLKEPFGNGLPERGYDPGENTYQAPPKDRNAVDVKVAPTSDRLQVLKPFKPWDGKDALNMPILIKSLGKTTTDHISMAGPWLKYRGHLENISNNYMIGAINAENKKANSVRNVYTGEYKGVPDTARDYRDEGIKWVVIGDENFGEGSSREHAALEPRFLGGFAIITKSFARIHETNLKKQGLLPLNFKNPADYDKINPDDKIDILGLTELAPGKNVTMRVHPKNGEAWDCELTHTFNSEQIEWFKYGSALNKIKADKA

SEQ ID NO: 171 - DNA, 2070 bp, Candida glabrata
atggtggtactgcgtaggtctttccacgtatatactcgactgcagcgcggtcagaacttgactgagaagattgtgcagcaatacagcgtcggtcttgccccaggtaagcgagtgcactccggtgactatgtctccatcaagccagcacacgtcatgtcccatgacaactcctggccagtggcattgaagttcatgaacctcggtgcccgcacagtgaaggaccccaggcagatagtcaacacgctggaccacgacatccagaacaagtccgacaagaacttgaccaagtacagaaacatcgagagcttcgccaagaagcacggcatcgacttctacccggcaggcagaggtatcggccaccagatcatggtcgaggaaggctacgctttcccattgaacttgaccgtggcctcagactcacactccaacacttacggtggtatgggtgccctgggtaccccagtggtgagaacagacgcggctgccatctgggccacaggccagacctggtggcagatcccaccagtggcccaagttgagttcaagggcaagctacatgaatcagtgtcaggtaaagacatcatcgtcgctctgtgcggtgtcttcaacaaggatcaagtgctgaaccacgccatcgagtttacaggagatgccatcaagcacctgcccgtggatttcagattaacaatagccaacatgacgacagaatggggtgccctttcaggtctattcccagtagatgacaccctgatcaattggtacaagaatcgtctgaacatagtcggtcctaaccacccaaggatcaatgagacaaccatcaagaacttggaagacaaagccaaagtattcaaggctgactccgacgccgtctacgctaaaaagctagtcatcgatctatcgactttgactcactatgtgtcaggtccaaatagcgtcaaagtctctaacactgtccaggatctggctcgcgataacataaagatcaacaaggcttacctggtgtcctgtaccaacgctcgtctctctgatttggaatctgccgctaaagtcgtttgcccaacgggagacctctccaaggtcaacaaagttgctgacggtgttgagttctacttcgctgctgcttcttctgaaattgagaaagaagctgctgagaagggtatatggcaagcactattggccgctggctgtaagcctctgccatctggctgtggtccatgtatcggtctaggtgctgggcttctggagccaggtgaagtcggtatcagtgccactaacagaaacttcaagggtagaatgggttcaaaggatgctttggcctacttggcctccccagccgtggttgccgcatctgctgtcttgggtagaatcggttctccagctgaagtatggggtattgaggacgtcaagtcttctggattacttgccgaggagttagcatgcaacactgaaacctcaaccgccacaccagtttctgaaggttctgctgctaaggttgaaatgttagaaggcttcccagaagagattgtaggtgaattggtgctttgtgacgccgacaacgtaaataccgatggtatttacccaggtaagtatacgtaccaagatgatgtctctcgtgagactatggcacaagtctgtatggaaaactatgacggtgaatttggttccaaggctaacgctggtgatattttggtgagtggatttaactttggtaccggttcctccagagaacaagcagctacttctttacttgcaaagggtattaatctggtggttgcagggtccttcagtaacactttctcgagaaactccatcaataacgcattgcttactctggagattccaaccttagttgaaaagctacgttccaagttcgagaatgcaccaaaggaattgaccagaagaactggatggttcttaaaatgggatgttcctaacgctaaagtttatgttacagaaggtagtccagatggccaagtcctattagaacaaaaggtcggtgaactaggtaagaacttgcaagagattattattaaaggcggtcttgaaggttgggtcaagtctcaattgtga

SEQ ID NO: 172 - protein, 689 aa, Candida glabrata
MVVLRRSFHVYTRLQRGQNLTEKIVQQYSVGLAPGKRVHSGDYVSIKPAHVMSHDNSWPVALKFMNLGARTVKDPRQIVNTLDHDIQNKSDKNLTKYRNIESFAKKHGIDFYPAGRGIGHQIMVEEGYAFPLNLTVASDSHSNTYGGMGALGTPVVRTDAAAIWATGQTWWQIPPVAQVEFKGKLHESVSGKDIIVALCGVFNKDQVLNHAIEFTGDAIKHLPVDFRLTIANMTTEWGALSGLFPVDDTLINWYKNRLNIVGPNHPRINETTIKNLEDKAKVFKADSDAVYAKKLVIDLSTLTHYVSGPNSVKVSNTVQDLARDNIKINKAYLVSCTNARLSDLESAAKVVCPTGDLSKVNKVADGVEFYFAAASSEIEKEAAEKGIWQALLAAGCKPLPSGCGPCIGLGAGLLEPGEVGISATNRNFKGRMGSKDALAYLASPAVVAASAVLGRIGSPAEVWGIEDVKSSGLLAEELACNTETSTATPVSEGSAAKVEMLEGFPEEIVGELVLCDADNVNTDGIYPGKYTYQDDVSRETMAQVCMENYDGEFGSKANAGDILVSGFNFGTGSSREQAATSLLAKGINLVVAGSFSNTFSRNSINNALLTLEIPTLVEKLRSKFENAPKELTRRTGWFLKWDVPNAKVYVTEGSPDGQVLLEQKVGELGKNLQEIIIKGGLEGWVKSQL

SEQ ID NO: 173 - DNA, 1728 bp, artificial sequence
  codon optimized coding region
atgctttctacaactaggaatgttggaaagaagctgaacaaatacagtcatataattaccgaaccaaaggaccagggtgctagtcaagccatgctttatgccactggttttaaggaagacgacttcggtaaagcccaagttggcgtaggttcttgttggtggtctggtaatccgtgtaacatgcatttaatggattttaacaacagaattaccgaaagtgttaacaaagctgggttaaagggaatgcaattcaatactattggtgtctctgatggaatctctatgggaacaaagggaatgagatatagtctacaatcgagggaggttattgcagacagcttcgagacgattatgatggcacagcactatgatgcaaatatcgcgattccttcttgtgataaaaacatgccaggtgtcctaatggctatgggacgtcacaacaggccttcaataatggtttatggaggtactatccttcccggttcccctacatgtggaagtgctaagatccccaaaaagatagatgtcgtcagcgcatttcaatcttacggtcaatatttgtctaaagagtttacggaaactgaaagacaagacgtggtccaacatgcttgtccaggcccaggttcctgcggcggtatgtacactgcaaacacaatggcatccgtcgcagaagtccttggtatgacacttccaaactcgtcctcgttccctgcagtatcgaaagaaaaacttaatgaatgtgacactattggagaagcaataaagaagacaatggagttaggtataacgccacgtgacgttatgaccaaagaagccttcgaaaacgccatgacttatgtaattgctaccggtggaagtactaatgctgttcttcacatggtcgctgttgcgcattccgctggtgtaaagatcaccccagacgactttcagagaatttcggacaaaacgcccttgttgggtgactttaagccttctggcaaatatgttatggccgaccttattactgtcggtggtacacaagcagttattaagtatttatacgaagaaggctttctgcatggcaacacaattactattagcggtgacacactggcggagagagctgccaaagctgtaagtttaaaggatggtcaagacatcattagacctttgaccaatccgatcaaaacttctggacacttgcaaattctgtatggatcactggccccaggtggctcagtaggaaaaataaccggcaaagaagggacttacttcaaaggaaaggcaagggttttcaatgatgaacccggcttcatatccgcattagagaatggtgaaatcaaaaagggtgaaaagaccgtagtcatcattaggtatgagggaccaagaggtggaccaggaatgccagaaatgttgaagccatccagtgccttaatgggttatggtttaggtaaggatgttgctctgttaactgacggtagatttagtggcggttctcacggttttcttattggacatatagtacctgaggcggctgaaggtggtcccatagggttagtgagagacggtgatgagataatcattgatgccgataataacaagatagatttacttgtaccagaagaagaaattgctgagcgtcgtagtacttggactgctccacctccacgttacaccagaggttgtttaagtaaatatgcgaaactggtgagcaatgcctcccacggttgtgtaacggatcttaactaa

SEQ ID NO: 174 - DNA, 1674 bp, Nitrosomonas europaea
atgccagataatcgacgcagccaaaccattacccaaggtgcacaacgcacccccaaccgcgccatgttacgcgcagtcggtttcggtgacggagacttcgataaacctatcgtcggggttgccaacggtttttccaccatcacaccctgcaacatggggctggatacccttgccaaatgcgccgaacatgcgctgaaaaccgccggtgccatgccgcagatgtttggcaccatcaccgtatccgacgggatctccatgggtaccgaaggcatgaagtattctctggtttcgcgcgaagtgatcgccgattcgatcgaaacctgcgtacaggcggaaagtatggatggcgtcatcgccatcggtggttgcgataaaaacatgcctggcgccatgatcgcgctggccagactgaacgtaccgtccatcttcgtctatggcggtaccatcaaacctggccattaccagggccgtgatctgaccatcgtaagcgctttcgaagctgtcggacagcataccgcgcacaagatagacgatcatgaactgctggaagtcgaacgccatgcctgtcccggcgccggttcgtgcggtggtatgtacacagccaacaccatgtcatctgccatcgaggcaatgggaatgagcctgccttactcttccaccatggcagcagaagatgaggaaaaacggatcagcgccatacgctccgccgaagtactggtggacgcggtcaaaaagcagattctgccgcgcagcctgatcacccgcaaatccatcgaaaatgcggtatctgtcgtcatggcggtgggaggttcgaccaatgccgtgctgcacctgctggccatcgcccatgcagccgaagtggaattcagcatcgatgatttcgaagccattcgtgcacgcgtaccggtattgtgcgatctgaaaccttccggacgctatgtagccacggatctgcacaaagcgggcggtattccgcaagtgatgaaaatgttgctggtacacgacctgctgcacggcgactgtctgaccatcagcggacaaaccatcgcggaagtgctgaaagacattcccgaacagccgcgtgccgatcaggatgtgattcaaccctgggacaatccggtatatgaacaggggcacctggcgatcctgaaaggtaatctttcatcagaaggtgcggttgccaagatttccggcatcaaaaatcccagtattaccggtcccgccagagtgttcgattctgaagaaacctgcatggctgccattcttgaacgcaaaatccagccaggtgatgtggtggtcatccgctacgaaggcccacagggcggacccggcatgcgcgaaatgctttctcccacttcagcactgatcggtgaagggctgggtgattcggtcgggttgattaccgatgggcgtttctccggtggtacctacggaatggtggtgggccatgtggcaccggaagcattcgccggcggaacgatcgccctggtacaagagggagattcgattacgatcgatgcacaccgtcgcctgctgcaactgaatgttcctgaagccgagctggaacgccgccgggcagcctggcatccacctgcaccacgctacacacgcggcgtactggcgaaatacgccaagctggtatccactgccagccgtggtgcagtcaccgattaa

SEQ ID NO: 175 - protein, 557 aa, Nitrosomonas europaea
MPDNRRSQTITQGAQRTPNRAMLRAVGFGDGDFDKPIVGVANGFSTITPCNMGLDTLAKCAEHALKTAGAMPQMFGTITVSDGISMGTEGMKYSLVSREVIADSIETCVQAESMDGVIAIGGCDKNMPGAMIALARLNVPSIFVYGGTIKPGHYQGRDLTIVSAFEAVGQHTAHKIDDHELLEVERHACPGAGSCGGMYTANTMSSAIEAMGMSLPYSSTMAAEDEEKRISAIRSAEVLVDAVKKQILPRSLITRKSIENAVSVVMAVGGSTNAVLHLLAIAHAAEVEFSIDDFEAIRARVPVLCDLKPSGRYVATDLHKAGGIPQVMKMLLVHDLLHGDCLTISGQTIAEVLKDIPEQPRADQDVIQPWDNPVYEQGHLAILKGNLSSEGAVAKISGIKNPSITGPARVFDSEETCMAAILERKIQPGDVVVIRYEGPQGGPGMREMLSPTSALIGEGLGDSVGLITDGRFSGGTYGMVVGHVAPEAFAGGTIALVQEGDSITIDAHRRLLQLNVPEAELERRRAAWHPPAPRYTRGVLAKYAKLVSTASRGAVTD

SEQ ID NO: 176 - DNA, 1686 bp, Synechocystis sp.
atgtccaacaatcccagaagccaggtaattacccagggcacccaacggagtcccaaccgggccatgctccgggccgttggttttggcgatgatgactttacgaaacccattgtgggtattgccaacgggtacagcaccattaccccctgcaacatgggcattaatgatctggctctacgggccgaggccggcttacggacagcgggggccatgccccaattgtttggcactatcaccatcagtgacggtatttccatgggtacggaagggatgaaatattccctagtttcccgggaagtgattgctgattccatcgaaacagtatgcaatggccaacgcatggacggagttttggcgatcgggggctgtgataagaatatgccgggggcaatgattgccatggctcgcctcaatattccctctatctttgtttacggtggcactattaaacccggacattatgccggggaagatttaacagtggtcagtgcctttgaagcggtgggccagtacagcgctggcaaaattgatgaggaaaccctctacggcattgaacggaatgcctgtcctggggctggttcctgtggggggatgttcaccgccaacaccatgtcctccgcctttgaagctatggggatgagcttgccctattcttctaccatggccgcagtggatggggaaaaagccgacagcaccgaggagtccgccaaggttttggtggaagccatcaaaaaacagattttgcccagtcaaattctgacccggaaagcttttgaaaatgccattgccgtgattatggccgtggggggctccactaatgcagtgctccatctgctggcgatcgccaacaccattggggtgcccctaagcttggacgattttgaaaccattcgccacaaagtacctgtactgtgcgacctcaaaccttccggcaaatacgtcaccactaatctccacgccgccggtggcattccccaggtgatgaaaatattgctggtcaatggcattctccacggtgacgctttaacgattacaggacagaccattgctgaagttttagccgatattcctgaccaaccccctgccggccaggacgtaatccattcctgggatgaccctgtttatcaagaaggtcacctggcagtgctcaaaggtaacctggccaccgaaggcagtgtggctaaaatcagcggtgttaaaaagccggtgatcactggtcccgccaaagtatttgaatctgaagaagattgcctagaagcgattctagccggcaaaattcaagcaggagatgtggtggtcgtgcgctatgaagggcccaaaggtggccccggtatgcgggaaatgctagcccccacttctgccatcattggggcagggttgggagactccgttggcctaatcaccgatggccgcttttctggtggtacctatggcttagtggtgggtcacgttgcccccgaagcttatgtgggaggggcgatcgccttggtgcaagagggggatcaaatcaccatcgatgctggcaagcggttactgcaactcaacatcagtgaagaggaattggcccaacggcgggcccaatggactcctcctcagccccgctatccccgggggattttagccaagtatgccaagttagtttcctccagcagccttggtgcagtgactgatatagacttgttctaa

SEQ ID NO: 177 - protein, 561 aa, Synechocystis sp.
MSNNPRSQVITQGTQRSPNRAMLRAVGFGDDDFTKPIVGIANGYSTITPCNMGINDLALRAEAGLRTAGAMPQLFGTITISDGISMGTEGMKYSLVSREVIADSIETVCNGQRMDGVLAIGGCDKNMPGAMIAMARLNIPSIFVYGGTIKPGHYAGEDLTVVSAFEAVGQYSAGKIDEETLYGIERNACPGAGSCGGMFTANTMSSAFEAMGMSLPYSSTMAAVDGEKADSTEESAKVLVEAIKKQILPSQILTRKAFENAIAVIMAVGGSTNAVLHLLAIANTIGVPLSLDDFETIRHKVPVLCDLKPSGKYVTTNLHAAGGIPQVMKILLVNGILHGDALTITGQTIAEVLADIPDQPPAGQDVIHSWDDPVYQEGHLAVLKGNLATEGSVAKISGVKKPVITGPAKVFESEEDCLEAILAGKIQAGDVVVVRYEGPKGGPGMREMLAPTSAIIGAGLGDSVGLITDGRFSGGTYGLVVGHVAPEAYVGGAIALVQEGDQITIDAGKRLLQLNISEEELAQRRAQWTPPQPRYPRGILAKYAKLVSSSSLGAVTDIDLF

SEQ ID NO: 178 - DNA, 1716 bp, Streptococcus mutans
atgactgacaaaaaaactcttaaagacttaagaaatcgtagttctgtttacgattcaatggttaaatcacctaatcgtgctatgttgcgtgcaactggtatgcaagatgaagactttgaaaaacctatcgtcggtgtcatttcaacttgggctgaaaacacaccttgtaatatccacttacatgactttggtaaactagccaaagtcggtgttaaggaagctggtgcttggccagttcagttcggaacaatcacggtttctgatggaatcgccatgggaacccaaggaatgcgtttctccttgacatctcgtgatattattgcagattctattgaagcagccatgggaggtcataatgcggatgcttttgtagccattggcggttgtgataaaaacatgcccggttctgttatcgctatggctaacatggatatcccagccatttttgcttacggcggaacaattgcacctggtaatttagacggcaaagatatcgatttagtctctgtctttgaaggtgtcggccattggaaccacggcgatatgaccaaagaagaagttaaagctttggaatgtaatgcttgtcccggtcctggaggctgcggtggtatgtatactgctaacacaatggcgacagctattgaagttttgggacttagccttccgggttcatcttctcacccggctgaatccgcagaaaagaaagcagatattgaagaagctggtcgcgctgttgtcaaaatgctcgaaatgggcttaaaaccttctgacattttaacgcgtgaagcttttgaagatgctattactgtaactatggctctgggaggttcaaccaactcaacccttcacctcttagctattgcccatgctgctaatgtggaattgacacttgatgatttcaatactttccaagaaaaagttcctcatttggctgatttgaaaccttctggtcaatatgtattccaagacctttacaaggtcggaggggtaccagcagttatgaaatatctccttaaaaatggcttccttcatggtgaccgtatcacttgtactggcaaaacagtcgctgaaaatttgaaggcttttgatgatttaacacctggtcaaaaggttattatgccgcttgaaaatcctaaacgtgaagatggtccgctcattattctccatggtaacttggctccagacggtgccgttgccaaagtttctggtgtaaaagtgcgtcgtcatgtcggtcctgctaaggtctttaattctgaagaagaagccattgaagctgtcttgaatgatgatattgttgatggtgatgttgttgtcgtacgttttgtaggaccaaagggcggtcctggtatgcctgaaatgctttccctttcatcaatgattgttggtaaagggcaaggtgaaaaagttgcccttctgacagatggccgcttctcaggtggtacttatggtcttgtcgtgggtcatatcgctcctgaagcacaagatggcggtccaatcgcctacctgcaaacaggagacatagtcactattgaccaagacactaaggaattacactttgatatctccgatgaagagttaaaacatcgtcaagagaccattgaattgccaccgctctattcacgcggtatccttggtaaatatgctcacatcgtttcgtctgcttctaggggagccgtaacagacttttggaagcctgaagaaactggcaaaaaatga

SEQ ID NO: 179 - protein, 571 aa, Streptococcus mutans
MTDKKTLKDLRNRSSVYDSMVKSPNRAMLRATGMQDEDFEKPIVGVISTWAENTPCNIHLHDFGKLAKVGVKEAGAWPVQFGTITVSDGIAMGTQGMRFSLTSRDIIADSIEAAMGGHNADAFVAIGGCDKNMPGSVIAMANMDIPAIFAYGGTIAPGNLDGKDIDLVSVFEGVGHWNHGDMTKEEVKALECNACPGPGGCGGMYTANTMATAIEVLGLSLPGSSSHPAESAEKKADIEEAGRAVVKMLEMGLKPSDILTREAFEDAITVTMALGGSTNSTLHLLAIAHAANVELTLDDFNTFQEKVPHLADLKPSGQYVFQDLYKVGGVPAVMKYLLKNGFLHGDRITCTGKTVAENLKAFDDLTPGQKVIMPLENPKREDGPLIILHGNLAPDGAVAKVSGVKVRRHVGPAKVFNSEEEAIEAVLNDDIVDGDVVVVRFVGPKGGPGMPEMLSLSSMIVGKGQGEKVALLTDGRFSGGTYGLVVGHIAPEAQDGGPIAYLQTGDIVTIDQDTKELHFDISDEELKHRQETIELPPLYSRGILGKYAHIVSSASRGAVTDFWKPEETGKK

SEQ ID NO: 180 - DNA, 1719 bp, Streptococcus thermophilus
atggaggaaaacatcgtgtctgaaaataacatgaaacaccgttcttctgtctacgatagcatggttaaatcacctaaccgtgctatgcttcgtgcgactgggatgacggatgatagttttgaaaagcctattgttggggttatctcaacttgggctgagaacacgccatgtaatatccacttgcacggttttggtcaaattgccaaagagggtgtcaaagatgcgggtgcttggccagttcaatttggtacaattaccgttgcagatggtattgccatggggacaccagggatgcgtttctcattgacatctcgtgatattattgctgactcaatcgaagctgctatgggtggtcacaatgtcgatgcctttgttgctattggtggctgtgataagaacatgccaggttcaatgattgctattgccaacatggatattccagctatttttgcttacggtggtacgattgcaccgggtaatcttaacggtaaggatatcgacttggtttctgttttcgaaggtatcggtaaatggaaccacggagatatgactgccgaagaggttaaaaatcttgaatgtaatgcttgccctggccctggtggttgtggtggtatgtatactgctaacacaatggcaacagcaattgaggttatggggatgagccttccaggatcatcatctcaccctgcagaatcagctgagaagaaggctgatatcgaagaagcaggtcgtgcagttgtaaaaatgctagaaatgggacttaagccatcagatatcttgacacgtgaagcctttgaagatgccatcacagttacaatggcgcttggtggttcaacaaatgccactcttcacttgcttgctatcgctcatgcggctaacgttgatttaacgcttgaagacttcaacgatttccaagagcgcgtgcctcacttggctgacttgaagccttcaggtcaatatgtcttccaagacctttacaatgttggtggtgtgccagccgttatgaaatatcttcttaagaatggttttcttcacggtgatcgtatcacgtgtactggtaagactgttgcagaaaatttggaagctttcgatgatttgacaccaggtcaaaaagttatcatgccacttgaaaatcctaaacgtgccgatggtccattgattatcttgaaaggtaacttggccccagaaggtgctgttgccaaagtatcaggtgttaaagtgcgtaacattactggtcctgctaaagtatttgactcagaagaagatgccatcgaggcagttctttctgacgaaatcgttgacggcgatgtagttgttgtacgttttgtaggtcctaagggtggtcctggtatgccagaaatgttgtcattgtcatcaatgattgttggtaaaggacaaggagacaaggttgccctcttgactgatggacgtttctcaggtggtacttacggacttgttgtaggtcatattgctcctgaagctcaagttggtggaccgattgcctacctccgtacaggtgatatggttacagttgaccaggataccaaagaaatcactatgcatgtaccagacgaagagttggcgaaacgtaaagcagaaactgagttaccaccactttatagccgtggtgtcctcggtaagtatgctcacatcgtttcatcagcatcacgtggtgcggttactgacttctggaatatggataaatcaggtaaagcttaa

SEQ ID NO: 181 - protein, 572 aa, Streptococcus thermophilus
MEENIVSENNMKHRSSVYDSMVKSPNRAMLRATGMTDDSFEKPIVGVISTWAENTPCNIHLHGFGQIAKEGVKDAGAWPVQFGTITVADGIAMGTPGMRFSLTSRDIIADSIEAAMGGHNVDAFVAIGGCDKNMPGSMIAIANMDIPAIFAYGGTIAPGNLNGKDIDLVSVFEGIGKWNHGDMTAEEVKNLECNACPGPGGCGGMYTANTMATAIEVMGMSLPGSSSHPAESAEKKADIEEAGRAVVKMLEMGLKPSDILTREAFEDAITVTMALGGSTNATLHLLAIAHAANVDLTLEDFNDFQERVPHLADLKPSGQYVFQDLYNVGGVPAVMKYLLKNGFLHGDRITCTGKTVAENLEAFDDLTPGQKVIMPLENPKRADGPLIILKGNLAPEGAVAKVSGVKVRNITGPAKVFDSEEDAIEAVLSDEIVDGDVVVVRFVGPKGGPGMPEMLSLSSMIVGKGQGDKVALLTDGRFSGGTYGLVVGHIAPEAQVGGPIAYLRTGDMVTVDQDTKEITMHVPDEELAKRKAETELPPLYSRGVLGKYAHIVSSASRGAVTDFWNMDKSGKA

SEQ ID NO: 182 - DNA, 1674 bp, Ralstonia metallidurans
atggcttacaacaaacgttcccagcacatcacgcaaggcgtggcgcgctcccccaaccgttcgatgtactacgcgctcggctacaagaaggaagacttcgacaagccgatggtgggtatcgccaacggccactcgacgatcaccccctgcaacgccggcctgcagcgcctggcggacgcggccgtggatgcgatcaaggcctcggacgccaacccgcagatcttcggcacgccgacgatctccgacggcatgtcgatgggcaccgagggcatgaagtactcgctgatctcgcgtgaagtcattgccgactgcatcgaaaccgctgcccagggccagtggatggacggcgtggtcgtgatcggcggctgcgacaagaacatgcccggcggcatgatcgcactggcgcgcaccaacgtgccgggcatctacgtctacggcggcaccatccgcccgggtaactggaagggcaaggacctgaccatcgtgtcgtcgttcgaggccgtgggcgaattcaccgccggccgcatgagcgaggaagacttcgagggcgtggagaagaacgcctgcccgagcaccggctcgtgcggtggcatgtacaccgccaacacaatgagctcgtcgttcgaggcgctgggcatgtcgctgctgaattcgtcgacgatggccaacccggaccaggaaaaggtggacagcgccgccgaatcggcccgcgtgctggtggaagccatcaagaaggacatcaagccgcgcgacatcatcacgcgcaaatcgatcgagaacgccgtgacgctgatcatggccacgggcggttccaccaacgcggtactgcattacctggccatcgcccactcggccgaagtggaatggaccatcgacgatttcgagcgcatccgccgccgcgtgccggtgatctgcaacctgaagccgtcgggcgcctacgtggccaccgacctgcaccgcgccggtggcattccgcaagtgatgaagatcctgctgaacgccggtctgctgcatggcgactgcctgacgatcacgggccgcacgctggccgaggagctcgagcacgttcccaatgagccgcgtaccgaccaggacgtgatcctgccgatctcgcaggccctgtacaagcaaggccacctggccatcctgaagggcaacctcgccgaggaaggcgcagtggccaaaatcaccggcctgaagaacccggtcatcaccggcccggcccgcgtgttcgaggacgaacagagcgccatggaagcgatcctggcggacaagatcaacgctggcgacatcctggtgctgcgctaccttggcccgaagggcggcccgggcatgcctgaaatgctggcgccgacttcggcgatcatcggcaagggtctcggcgaatcggttggtttcatcaccgacggccgcttctcggggggcacctggggcatggtggttggccacgttgcgccggaagcccatgtgggcggtacgattgcactggttcaggaaggcgactcgatcacgatcgacgcgcaccagctgctgctgcaactgaatgtggccgacgacgagctggcccgccgccgcgctgcctggaaacagccggcgccgcgctacacgcgcggcgtactggcgaagttcgcgaggctggcctccacggccagcaagggcgccgtgacggactga

SEQ ID NO: 183 - protein, 557 aa, Ralstonia metallidurans
MAYNKRSQHITQGVARSPNRSMYYALGYKKEDFDKPMVGIANGHSTITPCNAGLQRLADAAVDAIKASDANPQIFGTPTISDGMSMGTEGMKYSLISREVIADCIETAAQGQWMDGVVVIGGCDKNMPGGMIALARTNVPGIYVYGGTIRPGNWKGKDLTIVSSFEAVGEFTAGRMSEEDFEGVEKNACPSTGSCGGMYTANTMSSSFEALGMSLLNSSTMANPDQEKVDSAAESARVLVEAIKKDIKPRDIITRKSIENAVTLIMATGGSTNAVLHYLAIAHSAEVEWTIDDFERIRRRVPVICNLKPSGAYVATDLHRAGGIPQVMKILLNAGLLHGDCLTITGRTLAEELEHVPNEPRTDQDVILPISQALYKQGHLAILKGNLAEEGAVAKITGLKNPVITGPARVFEDEQSAMEAILADKINAGDILVLRYLGPKGGPGMPEMLAPTSAIIGKGLGESVGFITDGRFSGGTWGMVVGHVAPEAHVGGTIALVQEGDSITIDAHQLLLQLNVADDELARRRAAWKQPAPRYTRGVLAKFARLASTASKGAVTD

SEQ ID NO: 184 - DNA, 1674 bp, Ralstonia eutropha
atggcattcaacaaacgctcccgcaacatcacgcaaggtgtggcgcgttccccgaaccgctcgatgtactacgccctgggctaccagaaggaagacttcgacaagcccatggtcggcatcgccaacggccactcgacgatcacgccgtgcaacgccggcctgcagcgcctggccgacgccgcgatcgacgccgtgaaggcctcggacgccaatccgcaggtattcggcacgccgacgatctccgacggcatgtcgatgggcaccgagggcatgaagtactcgctgatctcgcgcgaagtcattgccgactgcatcgagaccgccgcccagggccagtggatggacggcgtggtggtgatcggcggctgcgacaagaacatgccgggcggcatgatcgcgctcgcgcgcaccaatgtgccgggcatctacgtctatggcggcaccatcaagcccggcaactggaagggcaaggacctgaccatcgtgtcgtcgttcgaggccgtgggcgaattcaccgccggccgcatgagcgaagaagatttcgagggcgtggaaaggaacgcttgtccgtcgaccggatcgtgcggcggcatgtacaccgccaatacgatgagctcgtcgttcgaggcgcttgggatgtcgctgctgtattcgtcgacgatggccaaccccgatcaggaaaaggtcgatagcgctgccgaatcggcgcgcgtgctggtcgaggcgatcaagaaggacatcaagccgcgcgacatcatcacgcgcaagtcgatcgaaaacgccgtcgcgctgatcatggccaccggtggctcgaccaacgcggtgctgcactacctggccattgcgcactcggccgaagtcgaatggaccatcgacgatttcgagcgcatccgtcgcaaggtgcctgtgatctgcaacctgaagccgtcgggccagtacgtggccaccgacctgcacaaggcgggcggcatcccgcaggtcatgaagatcctgctgaaggccggactgctgcatggcgactgcctgaccatcacaggccgcacgctggctgaagagctggaacacgtgccggaccagccgcgggccgaccaggacgtgatcatgccaatcgagaaggcgctctatgcggaggggcatctggcgatcctgaagggcaatctcgccgaggaaggcgcggtggccaagatcaccggcctgaagaatccggtcatcaccgggccggcgcgggtgttcgaggatgaacagagcgcgatggaggcgatcctggccgacaagatcaatgcgggggatgtgctggtgctgcgctatcttgggcccaagggcgggcccgggatgccggaaatgctggcgcctacgtcagccattattggcaaggggttgggagagtcggtgggcttcatcaccgatggccggttctccgggggcacctgggggatggtcgtcggccatgtcgcgccggaagcgtatgtaggcggcaatattgcgctcgtgcgggaaggggattcgatcacgatcgatgcgcacaagctggtgttgcaggtgaatgtgtcggatgaggagttggctcgccgccgggctgagtggaaacaacctgttgcgcgttatacacggggggtattggccaagtttgctcgactggcgtcgacggccagtaagggggcggtgacggattga

SEQ ID NO: 185 - protein, 557 aa, Ralstonia eutropha
MAFNKRSRNITQGVARSPNRSMYYALGYQKEDFDKPMVGIANGHSTITPCNAGLQRLADAAIDAVKASDANPQVFGTPTISDGMSMGTEGMKYSLISREVIADCIETAAQGQWMDGVVVIGGCDKNMPGGMIALARTNVPGIYVYGGTIKPGNWKGKDLTIVSSFEAVGEFTAGRMSEEDFEGVERNACPSTGSCGGMYTANTMSSSFEALGMSLLYSSTMANPDQEKVDSAAESARVLVEAIKKDIKPRDIITRKSIENAVALIMATGGSTNAVLHYLAIAHSAEVEWTIDDFERIRRKVPVICNLKPSGQYVATDLHKAGGIPQVMKILLKAGLLHGDCLTITGRTLAEELEHVPDQPRADQDVIMPIEKALYAEGHLAILKGNLAEEGAVAKITGLKNPVITGPARVFEDEQSAMEAILADKINAGDVLVLRYLGPKGGPGMPEMLAPTSAIIGKGLGESVGFITDGRFSGGTWGMVVGHVAPEAYVGGNIALVREGDSITIDAHKLVLQVNVSDEELARRRAEWKQPVARYTRGVLAKFARLASTASKGAVTD

SEQ ID NO: 186 - DNA, 1713 bp, Lactococcus lactis
atggaattcaaatataacggaaaagttgaatcaatagagctcaataagtattcaaaaacattgacacaagacccaacacagccagcgacccaagccatgcactatggcattggttttaaagatgaggacttcaaaaaagctcaggtcggaatcgtcagcatggattgggacggaaatccctgtaacatgcacttgggcacactcggtagtaaaatcaaaaattctgtcaatcaaactgacggactgattgggcttcaatttcacacgattggggtttctgacggaattgccaacggaaagcttggcatgagatattccttggtcagtcgtgaagttattgctgacagtattgaaaccaacgctggcgccgaatattacgatgcaattgtcgctgttcccggttgtgacaaaaatatgccaggctcaatcattggcatggctcggctcaatcgtccgtcaattatggtttatggtggaacgattgaacatggcgaatacaaaggcgaaaagttaaatattgtttcggcttttgaagcgcttggacaaaaaatcactggaaatatttccgaggaagattatcacggcgtcatttgtaatgccattccgggacagggtgcttgtgggggcatgtatacagcaaatacactggcttcggcaattgaaactttgggaatgagtttgccttattcggcttcaaatccagcggtcagtcaagaaaaagaagacgaatgtgatgaaattggtctggcaatcaaaaatttgctagaaaaagacatcaaaccaagcgatatcatgaccaaggaagcttttgaaaatgccataacgatcgtcatggttctcggtggttcaactaatgctgtgcttcatatcattgccatggctaatgccatcggtgtcgaaattacgcaagatgattttcaacgtatttccgatgtcacgcctgtgcttggcgacttcaagccaagtggcaagtacatgatggaagatttgcacaaaattggtggcgtgcctgctgttttgaaatatttgctcaaagagggcaagcttcatggcgactgtttgacagttactggtaaaactctagctgaaaatgttgaaacagcactggatttggactttgacagccaagacattattcgaccacttgaaaatcctatcaaagcaacaggtcatttgcaaattctctatggcaatcttgctgaaggtggttctgtggcaaaaatttctggaaaagaaggggaatttttcaaaggaacagctcgtgtctttgatggcgaacaacattttattgacggaattgagtcaggtcgtttgcacgcaggagatgtcgctgtcattcgtaatatcggtccagtcggaggcccaggaatgccagaaatgttaaaaccgacctcagccttgattggagcaggtcttggaaaatcttgtgctttgattactgacggacgtttctctggtggcacacatggctttgtggttggccacattgtccccgaagcggttgagggtggattgattggcttggtcgaagatgatgatattatcgagattgatgcggtcaataacagcattagtttgaaagttgctgacgatgagattgctagacgacgtgccaattatcaaaaacctgctcctaaagcaacgcgtggggttcttgctaaatttgctaaactcacgcgcccagccagtgaaggctgtgtgactgatttatag

SEQ ID NO: 187 - protein, 570 aa, Lactococcus lactis
MEFKYNGKVESIELNKYSKTLTQDPTQPATQAMHYGIGFKDEDFKKAQVGIVSMDWDGNPCNMHLGTLGSKIKNSVNQTDGLIGLQFHTIGVSDGIANGKLGMRYSLVSREVIADSIETNAGAEYYDAIVAVPGCDKNMPGSIIGMARLNRPSIMVYGGTIEHGEYKGEKLNIVSAFEALGQKITGNISEEDYHGVICNAIPGQGACGGMYTANTLASAIETLGMSLPYSASNPAVSQEKEDECDEIGLAIKNLLEKDIKPSDIMTKEAFENAITIVMVLGGSTNAVLHIIAMANAIGVEITQDDFQRISDVTPVLGDFKPSGKYMMEDLHKIGGVPAVLKYLLKEGKLHGDCLTVTGKTLAENVETALDLDFDSQDIIRPLENPIKATGHLQILYGNLAEGGSVAKISGKEGEFFKGTARVFDGEQHFIDGIESGRLHAGDVAVIRNIGPVGGPGMPEMLKPTSALIGAGLGKSCALITDGRFSGGTHGFVVGHIVPEAVEGGLIGLVEDDDIIEIDAVNNSISLKVADDEIARRRANYQKPAPKATRGVLAKFAKLTRPASEGCVTDL

SEQ ID NO: 188 - DNA, 1674 bp, Flavobacterium johnsoniae
atggaattaaataagtacagcaaaaccatcactcaagatcaaacacagcctgcggcgcaagcaatgttgtatggaattggtttaactgaagaagatttaaaaaaagcacaagttggtattgtcagcatgggttatgatggtaatacttgcaatatgcacttaaatgatttagcaaaagatgttaaaaaaggtgtttgggatgctggtctggtcggacttatttttaataccattggtgtaagtgacggaatttctaacggtacagaaggaatgcgttattcattagtttctcgtgatgtaatcgcagattctattgaaactgtagccggtgcacaatggtacgatagtattattgcaattcctggctgcgataaaaatatgcctggagcattaatcgcaatgggaagattaaaccgtccgtcaatgatggtttatggaggatctatccactcaggaaaatggaaaggtgaatctctaaacatcgtttctgcttttgaagctttaggaaaaaaagtaaaaggcgaaattactccggaagattttaaaggtgttattcaaaatgcttgtcctggagctggtgcctgcggtggtatgtatactgcaaacactatgtcttctgcaattgaagcattaggtatgagtatgccttacagttcttctaaccctgctttgagtcaggaaaaaagagacgaatgtattgctgccggagaagctattaaagttttattagaaaaagatattaagccaagagatattatgactcgtaaagctttcgaaaatgctattacaattgtagcagttttaggaggttctacaaacgcagttatgcacttaattgcaatggcacactctgttggtattacaattactcttgatgattttcaggcaattaacgacagaacacctgttcttgccgatatgaaaccaagtggtaaatatatgatggaagacattcacgaagtgggaggtattccgggtgtaatgaaatatttattgaaagtgggacttatccacggagattgtttaacagtaactggaaaaacagttgctgaaaacttagcttctacaccggatttacaagacggacaagaagtaattcatgaaattcaaaaagcgttaaaaccaacaggaaatattcaggttttatacggaaaccttgcttctgaaggagctgtggcaaaaatcagcggaaaagaaggggaatatttcgaaggaccagctgttgtatttgaaggggaatttgaagtaattccaggcttgcaggccggaaagattaaaccaggtaatgtcgtcgtcattagaggttgtggaccaaaaggtggtccgggaatgcctgaaatgctaaaaccgacatctgccattattggtgcaggattaggaagcagctgtgcacttattacagacggcagattctccggaggttcacacggattcgtggtaggacacgtaacaccagaggcttatgatggaggtggtattgcactagtaaaagatggagatttaattgctatcgatgctgtaaaaaatacaatcgacctgaaaatatctgacgaagaatttgcagctcgtaaagcggcttgggttcaaccagcgctaaaagttgacagaggggttttacttaaatacgcaagatcggtttctagtgcttcaacaggctgtgttaccgataattaa

SEQ ID NO: 189 - protein, 557 aa, Flavobacterium johnsoniae
MELNKYSKTITQDQTQPAAQAMLYGIGLTEEDLKKAQVGIVSMGYDGNTCNMHLNDLAKDVKKGVWDAGLVGLIFNTIGVSDGISNGTEGMRYSLVSRDVIADSIETVAGAQWYDSIIAIPGCDKNMPGALIAMGRLNRPSMMVYGGSIHSGKWKGESLNIVSAFEALGKKVKGEITPEDFKGVIQNACPGAGACGGMYTANTMSSAIEALGMSMPYSSSNPALSQEKRDECIAAGEAIKVLLEKDIKPRDIMTRKAFENAITIVAVLGGSTNAVMHLIAMAHSVGITITLDDFQAINDRTPVLADMKPSGKYMMEDIHEVGGIPGVMKYLLKVGLIHGDCLTVTGKTVAENLASTPDLQDGQEVIHEIQKALKPTGNIQVLYGNLASEGAVAKISGKEGEYFEGPAVVFEGEFEVIPGLQAGKIKPGNVVVIRGCGPKGGPGMPEMLKPTSAIIGAGLGSSCALITDGRFSGGSHGFVVGHVTPEAYDGGGIALVKDGDLIAIDAVKNTIDLKISDEEFAARKAAWVQPALKVDRGVLLKYARSVSSASTGCVTDN

SEQ ID NO: 190 - DNA, 2364 bp, Clostridium butyricum
atgataagtaaaggatttagtacccaaacagaaagaataaatattttaaaggctcaaatattaaatgctaaaccatgtgttgaatcagaaagagcaatattaataacagaatcatttaaacaaacagaaggccagccagcaattttaagaagagcattggcattgaaacacatacttgaaaatatccctataacaattagagatcaagaacttatagtgggaagtttaactaaagaaccaaggtcttcacaagtatttcctgagttttctaataagtggttacaagatgaattggatagattaaataagagaactggagatgcattccaaatttcagaagaaagtaaagaaaaattaaaagatgtctttgagtattggaatggaaagacaacaagtgagttagcaacttcatatatgacagaggaaacaagagaggcagtaaattgtgatgtatttactgtaggaaactactattataatggcgtaggacatgtatctgtagattatggaaaagtattaagggttggatttaatgggattataaatgaggctaaggaacaattagaaaaaaacaggagtatagatcctgattttataaagaaagaaaaattcctaaatagtgttattatctcatgcgaagctgcaataacatatgtaaatagatatgctaaaaaggctaaagagattgcagataatacaagtgatgcaaaaagaaaagctgaattaaatgaaatagcaaaaatttgttcaaaagtttcaggagagggagctaaatctttctatgaagcatgtcaattattttggtttattcatgcaataataaatatagaatctaatggacattctatttctccagctagatttgatcaatacatgtatccatattatgaaaatgataaaaatataacagataagtttgctcaagaattaatagattgtatctggattaaattaaatgatattaataaagtaagagatgagatttcaactaaacattttggtggttacccaatgtatcaaaacttaattgttgggggtcaaaattcagaaggaaaagatgcaactaataaagtatcatatatggcattagaagcagctgtccatgtaaagttgcctcagccatctttgtcagtaagaatatggaataagactccagatgaatttttgcttagagcagcagaattaactagagaagggttaggacttcctgcttattataatgatgaagttattattccagcattagtttctagaggtcttacattagaagatgcaagagactacggaataattggatgtgttgaaccacaaaagccaggaaaaacagaaggatggcatgattcagcattctttaatcttgcaagaatagtagagttaactataaattctggatttgataaaaataaacagattggacctaaaactcaaaattttgaagaaatgaaatcctttgatgaattcatgaaagcttataaagctcaaatggagtattttgtaaaacatatgtgctgtgctgataattgcatagatattgcacatgcagaaagagctccattacctttcttgtcatcaatggttgataattgtatcggaaaaggaaagagccttcaagatggtggtgcagaatataacttcagtggaccacaaggtgttggagtagctaatattggagattcattagttgcagttaaaaaaattgtgtttgatgaaaataagattactccttcagaattaaagaaaacattaaataatgattttaaaaattcagaagaaatacaagccttactaaaaaatgctcctaagtttggaaatgatattgatgaagttgataatttagctagagagggtgcattagtatactgtagagaagttaataaatatacaaatccaaggggaggaaattttcaaccaggattatatccatcttcaattaatgtatattttggaagcttaacaggtgctactccagatggaaggaaatccggacaaccattagctgatggggtttctccatcaagaggctgtgatgtatctggacctactgcagcttgtaactcagttagtaaattagatcattttatagcttcaaatggaactttatttaatcaaaaattccatccgtcagcattaaaaggtgataatggattaatgaatttatcatcattaataagaagttattttgatcaaaagggatttcatgttcaatttaatgtaatagataaaaaaatattacttgcagcacaaaaaaatcctgaaaaatatcaagatttaattgttagagttgcaggatatagtgcacagttcatttctttagataaatctattcaaaatgatattattgcaagaactgaacatgttatgtaa

SEQ ID NO: 191 - protein, 787 aa, Clostridium butyricum
MISKGFSTQTERINILKAQILNAKPCVESERAILITESFKQTEGQPAILRRALALKHILENIPITIRDQELIVGSLTKEPRSSQVFPEFSNKWLQDELDRLNKRTGDAFQISEESKEKLKDVFEYWNGKTTSELATSYMTEETREAVNCDVFTVGNYYYNGVGHVSVDYGKVLRVGFNGIINEAKEQLEKNRSIDPDFIKKEKFLNSVIISCEAAITYVNRYAKKAKEIADNTSDAKRKAELNEIAKICSKVSGEGAKSFYEACQLFWFIHAIINIESNGHSISPARFDQYMYPYYENDKNITDKFAQELIDCIWIKLNDINKVRDEISTKHFGGYPMYQNLIVGGQNSEGKDATNKVSYMALEAAVHVKLPQPSLSVRIWNKTPDEFLLRAAELTREGLGLPAYYNDEVIIPALVSRGLTLEDARDYGIIGCVEPQKPGKTEGWHDSAFFNLARIVELTINSGFDKNKQIGPKTQNFEEMKSFDEFMKAYKAQMEYFVKHMCCADNCIDIAHAERAPLPFLSSMVDNCIGKGKSLQDGGAEYNFSGPQGVGVANIGDSLVAVKKIVFDENKITPSELKKTLNNDFKNSEEIQALLKNAPKFGNDIDEVDNLAREGALVYCREVNKYTNPRGGNFQPGLYPSSINVYFGSLTGATPDGRKSGQPLADGVSPSRGCDVSGPTAACNSVSKLDHFIASNGTLFNQKFHPSALKGDNGLMNLSSLIRSYFDQKGFHVQFNVIDKKILLAAQKNPEKYQDLIVRVAGYSAQFISLDKSIQNDIIARTEHVM

SEQ ID NO: 192 - DNA, 915 bp, Clostridium butyricum
atgagtaaggagataaaaggcgttttatttaacatacaaaaattttcgttacatgatgggcctggaataagaactatagtattttttaagggatgttcaatgtcgtgcttatggtgcagtaatccagaatcccaagatattaaacctcaagtaatgtttaataaaaatttatgtacaaaatgtggaagatgtaaatctcaatgtaaaagtgcagctattgatatgaattcagaatataggatagataaaagcaaatgtacagagtgtacaaaatgtgttgataattgcttaagcggggcacttgttattgaaggaaggaattacagtgttgaagacgttataaaggaattgaaaaaagatagtgttcaatatagaagatcaaacggtggaattacactatctggaggggaagtattacttcaaccagattttgcagtggagcttttaaaagagtgtaaatcatatggctggcacactgccattgaaacagcaatgtatgttaatagtgaatctgtaaaaaaagtaattccatatatagatctggctatgattgatataaaaagtatgaatgatgaaatccataggaaatttacaggagtgagtaacgaaataatattacaaaacattaaattaagtgatgaattagctaaagaaataataatcagaattcctgtaatagaaggatttaatgcagatttacaaagtataggagcaatagctcaattttcaaaatcattaacaaatcttaaaagaatagatcttcttccataccataattatggagaaaataagtatcaagcaattggaagagagtattctttgaaagaactaaaatcacctagtaaagacaaaatggaaagattaaaagctttagttgaaatcatgggaataccgtgcacaattggagctgagtaa

SEQ ID NO: 193 - protein, 304 aa, Clostridium butyricum
MSKEIKGVLFNIQKFSLHDGPGIRTIVFFKGCSMSCLWCSNPESQDIKPQVMFNKNLCTKCGRCKSQCKSAAIDMNSEYRIDKSKCTECTKCVDNCLSGALVIEGRNYSVEDVIKELKKDSVQYRRSNGGITLSGGEVLLQPDFAVELLKECKSYGWHTAIETAMYVNSESVKKVIPYIDLAMIDIKSMNDEIHRKFTGVSNEIILQNIKLSDELAKEIIIRIPVIEGFNADLQSIGAIAQFSKSLTNLKRIDLLPYHNYGENKYQAIGREYSLKELKSPSKDKMERLKALVEIMGIPCTIGAE

SEQ ID NO: 194 - DNA, 9491 bp, artificial sequence
  vector
tcgcgcgtttcggtgatgacggtgaaaacctctgacacatgcagctcccggagacggtcacagcttgtctgtaagcggatgccgggagcagacaagcccgtcagggcgcgtcagcgggtgttggcgggtgtcggggctggcttaactatgcggcatcagagcagattgtactgagagtgcaccataaattcccgttttaagagcttggtgagcgctaggagtcactgccaggtatcgtttgaacacggcattagtcagggaagtcataacacagtcctttcccgcaattttctttttctattactcttggcctcctctagtacactctatatttttttatgcctcggtaatgattttcatttttttttttcccctagcggatgactctttttttttcttagcgattggcattatcacataatgaattatacattatataaagtaatgtgatttcttcgaagaatatactaaaaaatgagcaggcaagataaacgaaggcaaagatgacagagcagaaagccctagtaaagcgtattacaaatgaaaccaagattcagattgcgatctctttaaagggtggtcccctagcgatagagcactcgatcttcccagaaaaagaggcagaagcagtagcagaacaggccacacaatcgcaagtgattaacgtccacacaggtatagggtttctggaccatatgatacatgctctggccaagcattccggctggtcgctaatcgttgagtgcattggtgacttacacatagacgaccatcacaccactgaagactgcgggattgctctcggtcaagcttttaaagaggccctactggcgcgtggagtaaaaaggtttggatcaggatttgcgcctttggatgaggcactttccagagcggtggtagatctttcgaacaggccgtacgcagttgtcgaacttggtttgcaaagggagaaagtaggagatctctcttgcgagatgatcccgcattttcttgaaagctttgcagaggctagcagaattaccctccacgttgattgtctgcgaggcaagaatgatcatcaccgtagtgagagtgcgttcaaggctcttgcggttgccataagagaagccacctcgcccaatggtaccaacgatgttccctccaccaaaggtgttcttatgtagtgacaccgattatttaaagctgcagcatacgatatatatacatgtgtatatatgtatacctatgaatgtcagtaagtatgtatacgaacagtatgatactgaagatgacaaggtaatgcatcattctatacgtgtcattctgaacgaggcgcgctttccttttttctttttgctttttctttttttttctcttgaactcgacggatctatgcggtgtgaaataccgcacagatgcgtaaggagaaaataccgcatcaggaaattgtaaacgttaatattttgttaaaattcgcgttaaatttttgttaaatcagctcattttttaaccaataggccgaaatcggcaaaatcccttataaatcaaaagaatagaccgagatagggttgagtgttgttccagtttggaacaagagtccactattaaagaacgtggactccaacgtcaaagggcgaaaaaccgtctatcagggcgatggcccactacgtgaaccatcaccctaatcaagttttttggggtcgaggtgccgtaaagcactaaatcggaaccctaaagggagcccccgatttagagcttgacggggaaagccggcgaacgtggcgagaaaggaagggaagaaagcgaaaggagcgggcgctagggcgctggcaagtgtagcggtcacgctgcgcgtaaccaccacacccgccgcgcttaatgcgccgctacagggcgcgtcgcgccattcgccattcaggctgcgcaactgttgggaagggcgatcggtgcgggcctcttcgctattacgccagctggcgaaagggggatgtgctgcaaggcgattaagttgggtaacgccagggttttcccagtcacgacgttgtaaaacgacggccagtgagcgcgcgtaatacgactcactatagggcgaattgggtaccgggccccccctcgaggtcgacggcgcgccactggtagagagcgactttgtatgccccaattgcgaaacccgcgatatccttctcgattctttagtacccgaccaggacaaggaaaaggaggtcgaaacgtttttgaagaaacaagaggaactacacggaagctctaaagatggcaaccagccagaaactaagaaaatgaagttgatggatccaactggcaccgctggcttgaacaacaataccagccttccaacttctgtaaataacggcggtacgccagtgccaccagtaccgttacctttcggtatacctcctttccccatgtttccaatgcccttcatgcctccaacggctactatcacaaatcctcatcaagctgacgcaagccctaagaaatgaataacaatactgacagtactaaataattgcctacttggcttcacatacgttgcatacgtcgatatagataataatgataatgacagcaggattatcgtaatacgtaatagttgaaaatctcaaaaatgtgtgggtcattacgtaaataatgataggaatgggattcttctatttttcctttttccattctagcagccgtcgggaaaacgtggcatcctctctttcgggctcaattggagtcacgctgccgtgagcatcctctctttccatatctaacaactgagcacgtaaccaatggaaaagcatgagcttagcgttgctccaaaaaagtattggatggttaataccatttgtctgttctcttctgactttgactcctcaaaaaaaaaaaatctacaatcaacagatcgcttcaattacgccctcacaaaaacttttttccttcttcttcgcccacgttaaattttatccctcatgttgtctaacggatttctgcacttgatttattataaaaagacaaagacataatacttctctatcaatttcagttattgttcttccttgcgttattcttctgttcttctttttcttttgtcatatataaccataaccaagtaatacatattcaaactagtatgactgacaaaaaaactcttaaagacttaagaaatcgtagttctgtttacgattcaatggttaaatcacctaatcgtgctatgttgcgtgcaactggtatgcaagatgaagactttgaaaaacctatcgtcggtgtcatttcaacttgggctgaaaacacaccttgtaatatccacttacatgactttggtaaactagccaaagtcggtgttaaggaagctggtgcttggccagttcagttcggaacaatcacggtttctgatggaatcgccatgggaacccaaggaatgcgtttctccttgacatctcgtgatattattgcagattctattgaagcagccatgggaggtcataatgcggatgcttttgtagccattggcggttgtgataaaaacatgcccggttctgttatcgctatggctaacatggatatcccagccatttttgcttacggcggaacaattgcacctggtaatttagacggcaaagatatcgatttagtctctgtctttgaaggtgtcggccattggaaccacggcgatatgaccaaagaagaagttaaagctttggaatgtaatgcttgtcccggtcctggaggctgcggtggtatgtatactgctaacacaatggcgacagctattgaagttttgggacttagccttccgggttcatcttctcacccggctgaatccgcagaaaagaaagcagatattgaagaagctggtcgcgctgttgtcaaaatgctcgaaatgggcttaaaaccttctgacattttaacgcgtgaagcttttgaagatgctattactgtaactatggctctgggaggttcaaccaactcaacccttcacctcttagctattgcccatgctgctaatgtggaattgacacttgatgatttcaatactttccaagaaaaagttcctcatttggctgatttgaaaccttctggtcaatatgtattccaagacctttacaaggtcggaggggtaccagcagttatgaaatatctccttaaaaatggcttccttcatggtgaccgtatcacttgtactggcaaaacagtcgctgaaaatttgaaggcttttgatgatttaacacctggtcaaaaggttattatgccgcttgaaaatcctaaacgtgaagatggtccgctcattattctccatggtaacttggctccagacggtgccgttgccaaagtttctggtgtaaaagtgcgtcgtcatgtcggtcctgctaaggtctttaattctgaagaagaagccattgaagctgtcttgaatgatgatattgttgatggtgatgttgttgtcgtacgttttgtaggaccaaagggcggtcctggtatgcctgaaatgctttccctttcatcaatgattgttggtaaagggcaaggtgaaaaagttgcccttctgacagatggccgcttctcaggtggtacttatggtcttgtcgtgggtcatatcgctcctgaagcacaagatggcggtccaatcgcctacctgcaaacaggagacatagtcactattgaccaagacactaaggaattacactttgatatctccgatgaagagttaaaacatcgtcaagagaccattgaattgccaccgctctattcacgcggtatccttggtaaatatgctcacatcgtttcgtctgcttctaggggagccgtaacagacttttggaagcctgaagaaactggcaaaaaatgttgtcctggttgctgtggttaagcggccgcgttaattcaaattaattgatatagttttttaatgagtattgaatctgtttagaaataatggaatattatttttatttatttatttatattattggtcggctcttttcttctgaaggtcaatgacaaaatgatatgaaggaaataatgatttctaaaattttacaacgtaagatatttttacaaaagcctagctcatcttttgtcatgcactattttactcacgcttgaaattaacggccagtccactgcggagtcatttcaaagtcatcctaatcgatctatcgtttttgatagctcattttggagttcgcgattgtcttctgttattcacaactgttttaatttttatttcattctggaactcttcgagttctttgtaaagtctttcatagtagcttactttatcctccaacatatttaacttcatgtcaatttcggctcttaaattttccacatcatcaagttcaacatcatcttttaacttgaatttattctctagctcttccaaccaagcctcattgctccttgatttactggtgaaaagtgatacactttgcgcgcaatccaggtcaaaactttcctgcaaagaattcaccaatttctcgacatcatagtacaatttgttttgttctcccatcacaatttaatatacctgatggattcttatgaagcgctgggtaatggacgtgtcactctacttcgcctttttccctactccttttagtacggaagacaatgctaataaataagagggtaataataatattattaatcggcaaaaaagattaaacgccaagcgtttaattatcagaaagcaaacgtcgtaccaatccttgaatgcttcccaattgtatattaagagtcatcacagcaacatattcttgttattaaattaattattattgatttttgatattgtataaaaaaaccaaatatgtataaaaaaagtgaataaaaaataccaagtatggagaaatatattagaagtctatacgttaaaccaccgcggtggagctccagcttttgttccctttagtgagggttaattgcgcgcttggcgtaatcatggtcatagctgtttcctgtgtgaaattgttatccgctcacaattccacacaacataggagccggaagcataaagtgtaaagcctggggtgcctaatgagtgaggtaactcacattaattgcgttgcgctcactgcccgctttccagtcgggaaacctgtcgtgccagctgcattaatgaatcggccaacgcgcggggagaggcggtttgcgtattgggcgctcttccgcttcctcgctcactgactcgctgcgctcggtcgttcggctgcggcgagcggtatcagctcactcaaaggcggtaatacggttatccacagaatcaggggataacgcaggaaagaacatgtgagcaaaaggccagcaaaaggccaggaaccgtaaaaaggccgcgttgctggcgtttttccataggctccgcccccctgacgagcatcacaaaaatcgacgctcaagtcagaggtggcgaaacccgacaggactataaagataccaggcgtttccccctggaagctccctcgtgcgctctcctgttccgaccctgccgcttaccggatacctgtccgcctttctcccttcgggaagcgtggcgctttctcatagctcacgctgtaggtatctcagttcggtgtaggtcgttcgctccaagctgggctgtgtgcacgaaccccccgttcagcccgaccgctgcgccttatccggtaactatcgtcttgagtccaacccggtaagacacgacttatcgccactggcagcagccactggtaacaggattagcagagcgaggtatgtaggcggtgctacagagttcttgaagtggtggcctaactacggctacactagaaggacagtatttggtatctgcgctctgctgaagccagttaccttcggaaaaagagttggtagctcttgatccggcaaacaaaccaccgctggtagcggtggtttttttgtttgcaagcagcagattacgcgcagaaaaaaaggatctcaagaagatcctttgatcttttctacggggtctgacgctcagtggaacgaaaactcacgttaagggattttggtcatgagattatcaaaaaggatcttcacctagatccttttaaattaaaaatgaagttttaaatcaatctaaagtatatatgagtaaacttggtctgacagttaccaatgcttaatcagtgaggcacctatctcagcgatctgtctatttcgttcatccatagttgcctgactccccgtcgtgtagataactacgatacgggagggcttaccatctggccccagtgctgcaatgataccgcgagacccacgctcaccggctccagatttatcagcaataaaccagccagccggaagggccgagcgcagaagtggtcctgcaactttatccgcctccatccagtctattaattgttgccgggaagctagagtaagtagttcgccagttaatagtttgcgcaacgttgttgccattgctacaggcatcgtggtgtcacgctcgtcgtttggtatggcttcattcagctccggttcccaacgatcaaggcgagttacatgatcccccatgttgtgcaaaaaagcggttagctccttcggtcctccgatcgttgtcagaagtaagttggccgcagtgttatcactcatggttatggcagcactgcataattctcttactgtcatgccatccgtaagatgcttttctgtgactggtgagtactcaaccaagtcattctgagaatagtgtatgcggcgaccgagttgctcttgcccggcgtcaatacgggataataccgcgccacatagcagaactttaaaagtgctcatcattggaaaacgttcttcggggcgaaaactctcaaggatcttaccgctgttgagatccagttcgatgtaacccactcgtgcacccaactgatcttcagcatcttttactttcaccagcgtttctgggtgagcaaaaacaggaaggcaaaatgccgcaaaaaagggaataagggcgacacggaaatgttgaatactcatactcttcctttttcaatattattgaagcatttatcagggttattgtctcatgagcggatacatatttgaatgtatttagaaaaataaacaaataggggttccgcgcacatttccccgaaaagtgccacctgaacgaagcatctgtgcttcattttgtagaacaaaaatgcaacgcgagagcgctaatttttcaaacaaagaatctgagctgcatttttacagaacagaaatgcaacgcgaaagcgctattttaccaacgaagaatctgtgcttcatttttgtaaaacaaaaatgcaacgcgagagcgctaatttttcaaacaaagaatctgagctgcatttttacagaacagaaatgcaacgcgagagcgctattttaccaacaaagaatctatacttcttttttgttctacaaaaatgcatcccgagagcgctatttttctaacaaagcatcttagattactttttttctcctttgtgcgctctataatgcagtctcttgataactttttgcactgtaggtccgttaaggttagaagaaggctactttggtgtctattttctcttccataaaaaaagcctgactccacttcccgcgtttactgattactagcgaagctgcgggtgcattttttcaagataaaggcatccccgattatattctataccgatgtggattgcgcatactttgtgaacagaaagtgatagcgttgatgattcttcattggtcagaaaattatgaacggtttcttctattttgtctctatatactacgtataggaaatgtttacattttcgtattgttttcgattcactctatgaatagttcttactacaatttttttgtctaaagagtaatactagagataaacataaaaaatgtagaggtcgagtttagatgcaagttcaaggagcgaaaggtggatgggtaggttatatagggatatagcacagagatatatagcaaagagatacttttgagcaatgtttgtggaagcggtattcgcaatattttagtagctcgttacagtccggtgcgtttttggttttttgaaagtgcgtcttcagagcgcttttggttttcaaaagcgctctgaagttcctatactttctagagaataggaacttcggaataggaacttcaaagcgtttccgaaaacgagcgcttccgaaaatgcaacgcgagctgcgcacatacagctcactgttcacgtcgcacctatatctgcgtgttgcctgtatatatatatacatgagaagaacggcatagtgcgtgtttatgcttaaatgcgtacttatatgcgtctatttatgtaggatgaaaggtagtctagtacctcctgtgatattatcccattccatgcggggtatcgtatgcttccttcagcactaccctttagctgttctatatgctgccactcctcaattggattagtctcatccttcaatgctatcatttcctttgatattggatcatctaagaaaccattattatcatgacattaacctataaaaataggcgtatcacgaggccctttcgtc

SEQ ID NO: 195 - DNA, 643 bp, Saccharomyces cerevisiae; identical to SEQ ID NO: 25

SEQ ID NO: 196 - DNA, 60 bp, artificial sequence
  primer
aaccataaccaagtaatacatattcagcccatggaattcaaatataacggaaaagttgaa

SEQ ID NO: 197 - DNA, 62 bp, artificial sequence
  primer
tatatcaattaatttgaattaacgcggccgcctataaatctgtaacgcaaccttcactagcg

SEQ ID NO: 198 - DNA, 8946 bp, artificial sequence; identical to SEQ ID NO: 29
  vector

SEQ ID NO: 199 - DNA, 76 bp, artificial sequence; identical to SEQ ID NO: 30
  primer

SEQ ID NO: 200 - DNA, 68 bp, artificial sequence; identical to SEQ ID NO: 31
  primer

SEQ ID NO: 201 - DNA, 22 bp, artificial sequence
  primer
gttcttattccctcttgtatcc

SEQ ID NO: 202 - DNA, 20 bp, artificial sequence
  primer
cttggcagcaacaggactag

What is claimed is:

1. A recombinant yeast host cell comprising a heterologous dihydroxy-acid dehydratase (DHAD) protein that comprises
(i) an amino acid sequence having at least 95% identity to SEQ ID NO: 179 or 187 using the Clustal W method of alignment using the default parameters of GAP PENALTY=10, GAP LENGTH PENALTY=0.1, and Gonnet 250 series of protein weight matrix over the full length of the protein sequence; and
(ii) three conserved cysteine residues that correspond to positions 56, 129, and 201 of SEQ ID NO:179;
wherein the substrate 2,3-dihydroxyisovalerate is present in the yeast host cell and wherein the expressed heterologous DHAD protein catalyzes the conversion of 2,3-dihydroxyisovalerate to α-ketoisovalerate.

2. The recombinant yeast host cell of claim 1, wherein the recombinant yeast host cell comprising the heterologous DHAD is transformed with a chimeric gene that encodes said heterologous DHAD.

3. The recombinant yeast host cell of claim 1, wherein the amino acid sequence of the heterologous DHAD protein comprises SEQ ID NO: 179.

4. The recombinant yeast host cell of claim 1, wherein the recombinant yeast host cell comprises an engineered isobutanol biosynthetic pathway.

5. The recombinant yeast host cell of claim 4, wherein the engineered isobutanol biosynthetic pathway comprises the following substrate to product conversions:
(i) pyruvate to acetolactate (pathway step a);
(ii) acetolactate of (i) to 2,3-dihydroxyisovalerate (pathway step b);
(iii) 2,3-dihydroxyisovalerate of (ii) to α-ketoisovalerate (pathway step c);
(iv) α-ketoisovalerate of (iii) to isobutyraldehyde (pathway step d); and
(v) isobutyraldehyde of (iv) to isobutanol (pathway step e), and wherein
(a) the substrate to product conversion of step (i) is catalyzed by an acetolactate synthase;
(b) the substrate to product conversion of step (ii) is catalyzed by a ketol-acid reductoisomerase;
(c) the substrate to product conversion of step (iii) is catalyzed by the heterologous DHAD;
(d) the substrate to product conversion of step (iv) is catalyzed by an α-keto acid decarboxylase; and
(e) the substrate to product conversion of step (v) is catalyzed by an alcohol dehydrogenase.

6. The recombinant yeast host cell of claim 5, wherein two or more of the enzymes (a), (b), and (d) are heterologous to the recombinant yeast host cell.

7. The recombinant yeast host cell of claim 6, wherein two or more of the enzymes (a), (b), and (d) are over-expressed in the recombinant yeast host cell.

8. A method of converting 2,3-dihydroxyisovalerate to α-ketoisovalerate, comprising:
(a) providing the recombinant yeast host cell of claim 2; and
(b) culturing the recombinant yeast host cell under suitable conditions where 2,3-dihydroxyisovalerate is converted into α-ketoisovalerate.

9. The method of claim 8, wherein the recombinant yeast host cell comprises a disruption in an ilv3 gene that encodes mitochondrial DHAD, resulting in reduced expression of endogenous mitochondrial DHAD.

10. A method of producing isobutanol, comprising:
(a) providing the recombinant yeast host cell of claim 1.

11. The method of claim 10, wherein the recombinant yeast host cell comprises a disruption in an ilv3 gene that encodes mitochondrial DHAD, resulting in reduced expression of endogenous mitochondrial DHAD.

12. The method of claim 10, wherein the recombinant yeast host cell comprises an engineered isobutanol biosynthetic pathway.

13. The method of claim 10, further comprising:
(b) culturing the recombinant yeast host cell under suitable conditions to produce isobutanol from pyruvate; and
(c) recovering the isobutanol.

14. The method of claim 13, wherein said recovering is by distillation, liquid-liquid extraction, adsorption, decantation, pervaporation or combinations thereof.

15. The method of claim 13, further comprising (d) removing solids from the fermentation medium.

16. The method of claim 15, wherein said removing is by centrifugation, filtration or decantation.

17. The method of claim 15, wherein said removing step (d) occurs before said recovering step (c).
